(19) United States
(12) Patent Application Publication
(10) Pub. No.: US 2003/0165854 A1
(43) Pub. Date: Sep. 4, 2003

(54) Marker genes responding to treatment with toxins

(76) Inventors: Mary Jane Cunningham, The Woodlands, TX (US); Matthew R. Kaser, Castro Valley, CA (US)

Correspondence Address: INCYTE CORPORATION (formerly known as Incyte, Genomics, Inc.), 3160 PORTER DRIVE, PALO ALTO, CA, 94304, US

(21) Appl. No.: 10/006,285

(22) Filed: Dec. 5, 2001

Related U.S. Application Data
(60) Provisional application No. 60/251,986, filed on Dec. 5, 2000.

(51) Int. Cl. C12Q 1/68; C07H 21/04

(52) U.S. Cl. 435/6; 536/23.2

(57) ABSTRACT

The present invention relates to a combination comprising a plurality of cDNAs which are differentially expressed in treated rat liver and in human liver and which may be used in their entirety or in part to diagnose, stage, or treat a liver disorder, to monitor diagnostic and therapeutic applications, to detect metabolic and toxicological responses, and to elucidate drug mechanism of action.

[0001] This application is a nonprovisional application which hereby claims the benefit under Title 35, United States Code § 119(e) of U.S. provisional application Serial No. 60/251,986 filed Dec. 5, 2000.

### FIELD OF THE INVENTION

[0002] The present invention relates to a combination comprising a plurality of cDNAs which are differentially expressed in liver treated with toxins and which may be used entirely or in part to diagnose, stage, or treat a liver disorder, to monitor diagnostic and therapeutic applications, to detect metabolic and toxicological responses, and to elucidate drug mechanism of action.

### BACKGROUND OF THE INVENTION

[0003] Toxicity testing is a mandatory and time-consuming part of drug development programs in the pharmaceutical industry. A more rapid screen to determine the effects upon metabolism and to detect toxicity of lead drug candidates may be the use of gene expression microarrays. For example, microarrays of various kinds may be produced using full length genes or gene fragments. These arrays can then be used to test samples treated with the drug candidates to elucidate the gene expression pattern associated with drug treatment. This gene pattern can be compared with gene expression patterns associated with compounds which produce known metabolic and toxicological responses.

[0004] Benzo(a)pyrene is a known rodent and likely human carcinogen and is the prototype of a class of compounds, the polycyclic aromatic hydrocarbons (PAH). It is metabolized by several forms of cytochrome P450 (P450 isozymes) and associated enzymes to form both activated and detoxified metabolites. The ultimate metabolites are the bay-region diol epoxide, benzo(a)pyrene-7,8-diol-9,10-epoxide (BPDE) and the K-region diol epoxide, 9-hydroxy benzo(a)pyrene-4,5-oxide, both of which induce formation of DNA adducts. DNA adducts have been shown to persist in rat liver up to 56 days following treatment with benzo(a)pyrene at a dose of 10 mg/kg body weight three times per week for two weeks (Qu and Stacey (1996) Carcinogenesis 17:53-59).

[0005] Acetaminophen is a widely-used analgesic. It is metabolized by specific cytochrome P450 isozymes with the majority of the drug undergoing detoxification by glucuronic acid, sulfate and glutathione conjugation pathways. However, at supratherapeutic doses, acetaminophen is metabolized to an active intermediate, N-acetyl-p-benzoquinone imine (NAPQI) which can cause hepatic and renal failure. NAPQI then binds to sulfhydryl groups of proteins causing their inactivation and leading to subsequent cell death (Kroger et al. (1997) Gen Pharmacol 28:257-263).

[0006] Clofibrate is an hypolidemic drug which lowers elevated levels of serum triglycerides. In rodents, chronic treatment produces hepatomegaly and an increase in hepatic peroxisomes (peroxisome proliferation). Peroxisome proliferators (PPs) are a class of drugs which activate the PP-activated receptor in rodent liver, leading to enzyme induction, stimulation of S-phase, and a suppression of apoptosis (Hasmall and Roberts (1999) Pharmacol Ther 82:63-70). PPs include the fibrate class of hypolipidemic drugs, phenobarbitone, thiazolidinediones, certain non-steroidal anti-inflammatory drugs, and naturally-occuring fatty acid-derived molecules (Gelman et al. (1999) Cell Mol Life Sci 55:932-943). Clofibrate has been shown to increase levels of cytochrome P450 4A. It is also involved in transcription of β-oxidation genes as well as induction of PP-activated receptors (Kawashima et al. (1997) Arch Biochem Biophys 347:148-154). Peroxisome proliferation that is induced by both clofibrate and the chemically-related compound fenofibrate is mediated by a common inhibitory effect on mitochondrial membrane depolarization (Zhou and Wallace (1999) Toxicol Sci 48:82-89).

[0007] Toxicological effects in the liver are also induced by other compounds. These can include carbon tetrachloride (a necrotic agent), hydrazine (a steatotic agent), α-naphthylisothiocyanate (a cholestatic agent), 4-acetylaminofluorene (a liver mitogen), 3-methylcholanthrene (a potent carcinogen) and their corresponding metabolites which are used in experimental protocols to measure toxicological responses (Waterfield et al. (1993) Arch Toxicol 67:244-254).

[0008] The Han/Wistar strain of the Norway rat was found to be particularly resistant to the highly toxic environmental contaminant 2,3,7,8-tetrachlorodibenzo-p-dioxin (TCDD) compared to the Long-Evans strain of rat. Studies of liver-derived serum lipid and carbohydrate parameters and circulating regulatory hormones suggested that liver metabolic processes in response to a toxin are modulated by multifactoral genetic and epigenetic events and were therefore not predictable. For example, cytosolic levels of the aromatic hydrocarbon receptor (AHR), which is believed to mediate the toxic effects of TCCD, was significantly reduced in livers from the Han/Wistar strain. However, most alterations caused by TCDD were similar in both strains. Given that an experimental animal model in which an otherwise lethal response may be studied is available, the Han/Wistar is frequently the strain of choice to better understand the response of the liver to a toxic challenge (Pohjanvirta et al. (1987) Pharmacol Toxicol 60:145-150; ibid (1987) Arch Toxicol Suppl 11:345-347; ibid (1990) Pharmacol Toxicol 66:399-408; ibid (1998) Fundam Appl Toxicol 12:698-712; and ibid (1999) Toxicol Appl Pharmacol 155:82-95).

[0009] The potential application of gene expression profiling is particularly relevant to improving diagnosis, prognosis, and treatment of disease. For example, the amount of expression of a large number of cDNAs in tissues from subjects with biliary cirrhosis may be compared with the amount of expression of those cDNAs in normal tissue.

[0010] The present invention provides cDNAs and protein molecules which satisfy a need in the art for molecules which can be used to detect, treat and monitor the treatment of liver disorders, to provide measurements of metabolic and toxicological responses following treatment with known and experimental drugs, and in elucidate drug mechanisms of action.

### SUMMARY

[0011] The present invention provides a combination comprising a plurality of cDNAs and their complements which are differentially expressed in liver tissues in response to treatment with a toxin and which are selected from SEQ ID NOs: 1-514 as presented in the Sequence Listing. In one embodiment, each cDNA is differentially expressed at least three-fold, SEQ ID NOs: 1-202; in another embodiment, each cDNA is a rat template, SEQ ID NOs: 203-399; in yet another embodiment, each cDNA is a human cDNA homolgous to a rat cDNA, SEQ ID NOs: 400-514. In still yet another embodiment each human cDNA, SEQ ID NOs: 402, 404, 405, 407, 416, 421, 428, 431, 435, 438, 441, 446, 448, 456-458, 475, 489, 501, 502, 512, and 514, is predominantly expressed in liver. In one aspect, the combination is useful to diagnose a liver disorder selected from biliary cirrhosis, X-inked adrenoleukodystrophy, Zellweger syndrome, hepatorenal syndrome, hepatitis, and hepatocarcinoma. In another aspect, the combination is immobilized on a substrate.

[0012] The invention also provides a high throughput method to detect differential expression of one or more of the cDNAs of the combination. The method comprises hybridizing the substrate containing the combination with the nucleic acids of a sample, thereby forming one or more hybridization complexes, detecting the hybridization complexes, and comparing the hybridization complexes with those of a standard, wherein differences in the size and signal intensity of each hybridization complex indicates differential expression of nucleic acids in the sample. In one aspect, the sample is from a subject treated with a drug, and differential expression is used to evaluate the response to that treatment.

[0013] The invention further provides a high throughput method of screening a library or a plurality of molecules or compounds to identify a ligand. The method comprises combining the substrate containing the combination with the library or plurality of molecules or compounds under conditions to allow and to detect specific binding, thereby identifying a ligand. The library or plurality of molecules or compounds are selected from DNA molecules, RNA molecules, peptide nucleic acid molecules, mimetics, peptides, transcription factors, repressors, and other regulatory proteins. The invention additionally provides a method for purifying a ligand, the method comprising combining a cDNA of the invention with a sample under conditions which allow specific binding, recovering the bound cDNA, and separating the cDNA from the ligand, thereby obtaining purified ligand.

[0014] The invention still further provides an isolated cDNA selected from SEQ ID NOs: 411, 432, 441, 450, 457, 465, 474, 477, 499, 501, and 510 as presented in the Sequence Listing. The invention also provides a vector comprising the cDNA, a host cell comprising the vector, and a method for producing a protein comprising culturing the host cell under conditions for the expression of a protein and recovering the protein from the host cell culture.

[0015] The present invention provides a purified protein encoded and produced by a cDNA of the invention. The invention also provides a high-throughput method for using a protein to screen a library or a plurality of molecules or compounds to identify a ligand. The method comprises combining the protein or a portion thereof with the library or plurality of molecules or compounds under conditions to allow specific binding and detecting specific binding, thereby identifying a ligand which specifically binds the protein. The library or plurality of molecules or compounds are selected from DNA molecules, RNA molecules, peptide nucleic acid molecules, mimetics, peptides, proteins, agonists, antagonists, antibodies or their fragments, immunoglobulins, inhibitors, drug compounds, and pharmaceutical agents.

[0016] The invention further provides a method for using a protein to purify a ligand. The method comprises combining the protein or a portion thereof with a sample under conditions to allow specific binding, recovering the bound protein, and separating the protein from the ligand, thereby obtaining purified ligand. The invention still further provides a pharmaceutical composition comprising the protein. The invention still further provides a method for using the protein to produce an antibody. The method comprises immunizing an animal with the protein or an antigenically-effective epitope under conditions to elicit an antibody response, isolating animal antibodies, and screening the isolated antibodies with the protein to identify an antibody which specifically binds the protein. The invention yet still further provides a method for using the protein to purify antibodies which bind specifically to the protein.

### DESCRIPTION OF THE COMPACT DISC-RECORDABLE (CD-R)

[0017] CD-R 1 is labeled: “PA-0039 US, Copy 1,” was created on Dec. 5, 2001 the Sequence Listing formatted in plain ASCII text. The file for the Sequence Listing is entitled pa0039sl.txt, created on Dec. 5, 2001 and is 685 KB in size.

[0018] CD-R 2 is an exact copy of CD-R 1. CD-R 2 is labeled: “PA-0039 US, Copy 2,” and was created on Dec. 5, 2001.

[0019] The CD-R labeled as: “PA-0039 US, CRF,” contains the Sequence Listing formatted in plain ASCII text. The file for the Sequence Listing is entitled pa0039sl.txt, was created on Dec. 5, 2001 and is 685 KB in size.

[0020] The content of the Sequence Listing and each Table named above and as described below, submitted in duplicate on two (2) CD-Rs (labeled “PA-0039 US, Copy 1” and “PA-0039 US, Copy 2”), and the CRF (labeled “PA-0039 US, CRF”) containing the Sequence Listing, are incorporated by reference herein, in their entirety.

### DESCRIPTION OF THE SEQUENCE LISTING AND TABLES

[0021] A portion of the disclosure of this patent document contains material that is subject to copyright protection. The copyright owner has no objection to the facsimile reproduction by anyone of the patent document or the patent disclosure, as it appears in the Patent and Trademark Office patent file or records, but otherwise reserves all copyright rights whatsoever.

[0022] The Sequence Listing is a compilation of cDNAs obtained by sequencing and extension of clone inserts. Each sequence is identified by a sequence identification number (SEQ ID NO) and by the clone or nucleic acid sequence number (Incyte ID) from which it was obtained.

[0023] Table 1 lists the abundance of the rat cDNAs of the present invention which were differentially expressed at levels at least three-fold in liver treated with a toxin compared with levels of rat cDNA in untreated liver. Columns 1 and 2 show the SEQ ID NO and Clone ID of the rat cDNA clone, respectively. Column 3 shows the abundance of cDNA clones in rat liver treated with a toxin. Column 4 shows the rat strain name in which expression of the clone is preferentially regulated: Han/Wistar (HW) or Sprague-Dawley (SD). Column 5 shows the gender (F or M) of the rat in which expression of the clone is preferentially regulated. Column 6 shows the treatment whereby expression of the clone is preferentially regulated: acetominophen (APAP), benzo(a)pyrene (BP), clofibrate (CLO), α-naphthylisothiocyanate (ANIT), 4-acetylaminofluorene (4-AAF), hydrazine (Hydra), fenofibrate (Feno), and carbon tetrachloride (CCL4).

[0024] Table 2 lists the rat cDNAs (clone), the related rat (Rat Template), and human templates (Human Template) of the present invention. Columns 1 and 2 show the rat clone SEQ ID NO and the related Rat Template SEQ ID NO, respectively. Columns 3 and 4 show the related Human Template Number and Human Template SEQ ID NO, respectively. Columns 5, 6, and 7 show the Genbank ID of the Human Template BLAST Hit, the Hit Description (annotation in Genbank), and the calculated BLAST E-value, respectively.

[0025] Table 3 lists the tissue distribution of the human cDNAs. Columns 1 and 2 show the SEQ ID NO and Human Template ID of the human cDNA, respectively. Column 3 shows the tissue distribution of the cDNAs in the LIFESEQ GOLD database (Incyte Genomics, Palo Alto Calif.) as a percentage of all tissues in which cDNAs were found.

### DESCRIPTION OF THE INVENTION

[0026] Definitions

[0027] “Array” refers to an ordered arrangement of at least two cDNAs, proteins, or antibodies on a substrate. At least one of the cDNAs, proteins, or antibodies represents a control or standard, and the other, a cDNA, protein, or antibody of diagnostic or therapeutic interest. The arrangement of two to about 40,000 cDNAs, proteins, or antibodies on the substrate assures that the size and signal intensity of each labeled complex, formed between each cDNA and at least one nucleic acid, or antibody:protein complex, formed between each antibody and at least one protein to which the antibody specifically binds, is individually distinguishable.

[0028] A “combination” refers to at least two and up to 514 cDNAs selected from the group consisting of SEQ ID NOs: 1-514 or their complements as presented in the Sequence Listing.

[0029] “cDNA” refers to an isolated polynucleotide, nucleic acid molecule, or any fragment or complement thereof. It may have originated recombinantly or synthetically, may be double-stranded or single-stranded, represents coding and noncoding 3′ or 5′ sequence, and generally lacks introns. It may be combined with carbohydrate, lipids, protein or other materials to perform a particular activity such as diagnosis or form a useful composition for therapy.

[0030] The phrase “cDNA encoding a protein” refers to a nucleic acid sequence that closely aligns with sequences which encode conserved regions, motifs or domains that were identified by employing analyses well known in the art. These analyses include BLAST (Basic Local Alignment Search Tool; Altschul (1993) J Mol Evol 36: 290-300; Altschul et al. (1990) J Mol Biol 215:403-410) which provides identity within the conserved region. Brenner et al. (1998; Proc Natl Acad Sci 95:6073-6078) who analyzed BLAST for its ability to identify structural homologs by sequence identity found 30% identity is a reliable threshold for sequence alignments of at least 150 residues and 40% is a reasonable threshold for alignments of at least 70 residues (Brenner et al., page 6076, column 2).

[0031] The “complement” of a cDNA refers to a nucleic acid molecule which is completely complementary to the cDNA over its full length and which will hybridize to the cDNA or an mRNA under conditions of high stringency.

[0032] “Derivative” refers to a cDNA, a protein, or an antibody that has been subjected to a chemical modification. Derivatization of a cDNA can involve substitution of a nontraditional base such as queosine or of an analog such as hypoxanthine. These substitutions are well known in the art. Derivatization of a protein involves the replacement of a hydrogen by an acetyl, acyl, alkyl, amino, formyl, or morpholino group. Derivatization of an antibody involves fragmentation of the antibody and fusion with a peptide or other molecule or agent. Derivative cDNAs, proteins, or antibodies retain the biological activities of the naturally occurring molecule but may confer advantages such as longer lifespan or enhanced activity.

[0033] “Differential expression” refers to an increased or up-regulated or a decreased or down-regulated expression as detected by presence, absence or at least two-fold change in the amount or abundance of a transcribed messenger RNA or translated protein in a sample.

[0034] “Disorder” refers to a condition, disease or disorder of the liver disorder including, but not limited to, biliary cirrhosis, X-linked adrenoleukodystrophy, Zellweger syndrome, hepatorenal syndrome, hepatitis, and hepatocarcinoma.

[0035] “Identity” as applied to nucleic acid or protein sequences, refers to the quantification (usually percentage) of nucleotide or residue matches between at least two sequences aligned using a standardized algorithm such as Smith-Waterman alignment (Smith and Waterman (1981) J Mol Biol 147:195-197), CLUSTALW (Thompson et al. (1994) Nucleic Acids Res 22:4673-4680), or BLAST2 (Altschul et al. (1997) Nucleic Acids Res 25:3389-3402). BLAST2 may be used in a standardized and reproducible way to insert gaps in one of the sequences in order to optimize alignment and to achieve a more meaningful comparison between them. Similarity is an analogous score, but it is calculated with conservative substitutions taken into account; for example, substitution of a valine for a isoleucine or leucine.

[0036] “Isolated or purified” refers to a cDNA, protein, or antibody that is removed from its natural environment and that is separated from other components with which it is naturally present.

[0037] “Labeling moiety” refers to any reporter molecule, visible or radioactive label, than can be attached to or incorporated into a cDNA, protein or antibody. Visible labels include but are not limited to anthocyanins, green fluorescent protein (GFP), β glucuronidase, luciferase, Cy3 and Cy5, and the like. Radioactive markers include radioactive forms of hydrogen, iodine, phosphorous, sulfur, and the like.

[0038] “Protein” refers to a polypeptide or any portion thereof. A “portion” of a protein refers to that length of amino acid sequence which would retain at least one biological activity, a domain identified by PFAM or PRINTS analysis or an antigenic epitope of the protein identified using Kyte-Doolittle algorithms of the PROTEAN program (DNASTAR).

[0039] “Sample” is used in its broadest sense as containing nucleic acids, proteins, antibodies, and the like. A sample may comprise a bodily fluid; the soluble fraction of a cell preparation, or an aliquot of media in which cells were grown; a chromosome, an organelle, or membrane isolated or extracted from a cell; genomic DNA, RNA, or cDNA in solution or bound to a substrate; a biopsy, a cell; a tissue; a tissue print; a fingerprint, buccal cells, skin, or hair; and the like.

[0040] “Specific binding” refers to a special and precise interaction between two molecules which is dependent upon their structure, particularly their molecular side groups. For example, the intercalation of a regulatory protein into the major groove of a DNA molecule or the binding between an epitope of a protein and an agonist, antagonist, or antibody.

[0041] “Substrate” refers to any rigid or semi-rigid support to which cDNAs or proteins are bound and includes membranes, filters, chips, slides, wafers, fibers, magnetic or nonmagnetic beads, gels, capillaries or other tubing, plates, polymers, and microparticles with a variety of surface forms including wells, trenches, pins, channels and pores.

[0042] “Template” refers to a consensus sequence that was created using the LIFESEQ GOLD database and the assembly algorithm described in U.S. Ser. No. 09/276,534, filed Mar. 25, 1999 and incorporated by reference herein.

[0043] A “transcript image” is a profile of gene transcription activity in a particular tissue at a particular time.

[0044] “Variant” refers to molecules that are recognized variations of a cDNA or a protein encoded by the cDNA. Splice variants may be determined by BLAST score, wherein the score is at least 100, and most preferably at least 400. Allelic variants have a high percent identity to the cDNAs and may differ by about three bases per hundred bases. “Single nucleotide polymorphism” (SNP) refers to a change in a single base as a result of a substitution, insertion or deletion. The change may be conservative (purine for purine) or non-conservative (purine to pyrimidine) and may or may not result in a change in an encoded amino acid or its secondary, tertiary, or quaternary structure.

### THE INVENTION

[0045] The present invention relates to a combination comprising a plurality of cDNAs, SEQ ID NOs: 1-514 or their complements, which are differentially expressed in liver treated with toxins and which may be used entirely or in part to diagnose, stage, or treat a liver disorder, to monitor diagnostic and therapeutic applications, to detect metabolic and toxicological responses, and to investigate drug mechanism of action. The combination of cDNAs, SEQ ID NOs: 1-202 represent gene transcripts differentially expressed in the cells or tissues of rat liver from subjects treated with a toxin. The combination of cDNAs, SEQ ID NOs: 203-399, are rat templates assembled from cloned transcripts. The combination of cDNAs, SEQ ID NOs: 400-514 are human cDNAs which are homologous to the rat cDNAs and templates. SEQ ID NOs: 402, 404, 405, 407, 416, 421, 428, 431, 435, 438, 441, 446, 448, 456-458, 475, 489, 501, 502, 512, and 514 are predominantly expressed in human liver. SEQ ID NOs: 411, 432, 441, 450, 457, 465, 474, 477, 499, 501, and 510 represent novel human cDNAs. Since the novel human cDNAs were identified solely by the differential expression of their rat orthologs, it is not essential to know a priori the name, structure, or function of the gene or its encoded protein. The usefulness of the novel human cDNAs exists in their immediate value as diagnostics, and for establishing drug efficacy or toxic response.

[0046] Table 1 shows cDNAs cloned from expressed transcripts from a rat liver treated with a toxin. The cDNAs from treated libraries have 3-fold or greater (differential) expression compared with expression levels in untreated liver libraries. Toxins include acetominophen (APAP), benzo(a)pyrene (BP), clofibrate (CLO), α-naphthylisothiocyanate (ANIT), 4-acetylaminofluorene (4-AAF), hydrazine (Hydra), fenofibrate (Feno), and carbon tetrachloride (CCL4). Abundance of a clone was determined by counting the number of clones present in a master cluster.

[0047] Table 2 lists the rat cDNAs and templates and their related human cDNAs and templates. Where the row is blank, the rat templates had no human ortholog. Human templates which had a Genbank BLASTn E-value between 1 and 1×10⁻⁸ are described as “Incyte Unique”.

[0048] Table 3 lists the tissue distribution of the human cDNAs. The category: 1) sense organs, includes fetal cochlea; corneal fibroblasts primary line; corneal stroma primary line; pooled fetal retina; adult retina; and olfactory epithelium; and 2) unclassified/mixed, includes mixed melanocytes, uterus, fetal heart, fetal lung, testis, B-cells, pooled metastatic breast and ovary, pooled metastatic brain and Wilms tumor, pooled mixed sarcoma, myometrium, smooth muscle cells, and pooled high-grade urogenital transitional cell carcinoma. Where tissue distribution specificity was less than 10% percent, the distribution was classified “widely distributed”.

[0049] As shown in Table 1, rat cDNAs, SEQ ID NOs: 1-202, were identified as having greater than three-fold increased gene transcript levels in liver cDNA libraries isolated from rats treated with toxins compared with cDNAs from untreated rat liver libraries. These cDNAs were represented by at least three distinct clones corresponding to a single mRNA species.

[0050] In particular, specific mRNA species, SEQ ID NOs: 1-61, were upregulated only in cDNA libraries isolated from Han/Wistar rat liver whereas specific mRNA species, SEQ ID NOs: 62-202, were upregulated only in cDNA libraries isolated from Sprague Dawley rat liver. SEQ ID NOs: 1-61 may therefore be involved with molecular pathways which confer particular resistance to toxins in the Han/Wistar rat. SEQ ID NOs: 62-202 may therefore be involved with molecular pathways which confer particular resistance to toxins in the Sprague Dawley rat.

[0051] As shown in Table 1, levels of SEQ ID NOs: 1-11 may be preferentially upregulated in response to treatment with APAP, B(a)P, both B(a)P and CLO, and CLO, respectively. Messenger RNA levels of SEQ ID NOs: 12-61 were upregulated by more than two toxins and may therefore be involved with a broader metabolic response to toxic insult in the Han/Wistar rat. In addition, gender specific expression was seen in the mRNA levels of SEQ ID NO: 10 and in SEQ ID NOs: 12-14, which were predominantly upregulated in male and female rats, respectively.

[0052] Similarly, and also shown in Table 1, specific mRNA species of SEQ ID NOs: 62-202 were upregulated only in cDNA libraries isolated from Sprague Dawley rat liver treated with toxins. Moreover, the mRNA species were predominantly upregulated only in response to certain toxins: SEQ ID NOs: 62-73 by APAP; SEQ ID NOs: 74-106 by B(a)P; SEQ ID NOs: 107, 108, and 202 by APAP and B(a)P; SEQ ID NOs: 109-112, and 186-188, 190-191, 197, and 201 by B(a)P and CLO; SEQ ID NOs: 113-185, 189, 192, 194, 195, 198, 199 by CLO; and SEQID NOs: 193, 196, and 200 by more than two toxins. SEQ ID NOs: 193, 196, and 200 may be involved with a broader metabolic response to toxic insult in the Sprague Dawley rat liver. In addition gender specific expression was seen in the mRNA levels of SEQ ID NOs: 62-64, 109, 126-162, and 194-200 which were predominantly upregulated in male rats and in the mRNA levels of SEQ ID NOs: 74, 75, 113-125, and 188-193 which were predominantly upregulated in female rats.

[0053] The results in Table 1 appear to show a bias towards rat mRNAs responding to treatment with CLO, but this is due to an analytical artifact, since a large proportion of the cDNA libraries included in the analysis were constructed following subtractive hybridization of CLO-treated parent cDNA libraries.

[0054] As shown in Table 2, SEQ ID NOs: 400-514 are human homologs of the respective rat sequences, SEQ ID NOs: 176, 8, 7, 181, 32, 72, 109, 1, 188, 190, 14, 29, 27, 117, 6, 12, 196, 42, 189, 37, 100, 200, 78, 119, 23, 13, 41, 68, 5, 82, 175, 80, 39, 56, 137, 193, 16, 131, 90, 201, 17, 38, 87, 202, 177, 59, 158, 111, 47, 173, 11, 128, 79, 19, 48, 134, 43, 165, 192, 4, 15, 99, 84, 36, 163, 35, 33, 55, 143, 92, 168, 166, 126,40, 130, 115, 91, 191, 118, 63, 187, 77, 31, 172, 81, 174, 141, 46, 135, 51, 28, 159, 125, 184, 104, 45, 24, 65, 197, 34, 199, 94, 195, 129, 83, and 22, respectively, identified by BLAST analysis using the LIFESEQ GOLD database (Incyte Genomics). In addition, SEQ ID NOs: 411, 441, 432, 450, 457, 465, 474, 477, 499, 501, and 510 are novel human cDNAs.

[0055] As shown in Table 3, SEQ ID NOs: 402-405, 407, 416, 421, 428, 431, 435, 438, 441, 446, 448, 456-458, 475, 489, 501, 502, 512, and 514 are found predominantly in 22 human liver cDNA libraries from a total of 115 tissues (19%). The human liver cDNA libraries include tissue derived from fetal liver, livers with the following diagnosed pathologies: primary biliary cirrhosis, metastatic neuroendocrine carcinoma, hepatoma, metastatic colon adenocarcinoma, adenoma, hepatitis C, and from the human C3A hepatocyte cell line treated with APAP, pentobarbital, 3-methylcholanthrene (MCA), or vehicle. In addition, SEQ ID NOs: 441 and 457 are novel human cDNAs expressed in the C3A cell line treated with 5 mM MCA for 48 hours.

[0056] As shown in Table 1, SEQ ID NO: 441 is the human homolog of a rat cDNA which is differentially expressed in the Han/Wistar strain in response to treatment with toxins including carbon tetrachloride, α-naphthylisothiocyanate, and 4-acetylaminofluorene; and SEQ ID NO: 457 is the human homolog of a rat cDNA which is differentially expressed in male Sprague-Dawley rats in response to clofibrate treatment.

[0057] The cDNAs of the invention define a differential expression pattern against which to compare the expression pattern of biopsied and/or in vitro treated liver tissues. Experimentally, differential expression of the cDNAs can be evaluated by methods including, but not limited to, differential display by array technologies, clustering, gel electrophoresis and mass spectrophotometric analysis, genome mismatch scanning, representational discriminant analysis, spatial immobilization or transcript imaging. These methods may be used alone or in combination.

[0058] The combination may be arranged on a substrate and hybridized with samples from subjects with diagnosed liver disorders to identify those sequences which are differentially expressed in biliary cirrhosis and/ or other liver disorders. This process allows identification of those sequences of highest diagnostic and potential therapeutic value for a particular disorder. In one embodiment, an additional set of cDNAs, such as cDNAs encoding signaling molecules, are arranged on the substrate with the combination. Such combinations may be useful in the elucidation of pathways which are affected in a particular liver disorder or to identify new, coexpressed, candidate, therapeutic molecules.

[0059] In another embodiment, the combination can be used for large scale genetic or gene expression analysis of a large number of novel, nucleic acid molecules. These samples are prepared by methods well known in the art and are from mammalian cells or tissues which are in a certain stage of development; have been treated with a known molecule or compound, such as a cytokine, growth factor, a drug, and the like; or have been extracted or biopsied from a mammal with a known or unknown condition, disorder, or disease before or after treatment. The sample nucleic acids are hybridized to the combination for the purpose of defining a novel gene profile that is specifically associated with a particular disorder, developmental stage, or treatment protocol.

[0060] cDNAs and Their Uses

[0061] cDNAs can be prepared by a variety of synthetic or enzymatic methods well known in the art. cDNAs can be synthesized, in whole or in part, using chemical methods well known in the art (Caruthers et al. (1980) Nucleic Acids Symp Ser (7)215-233). Alternatively, cDNAs can be produced enzymatically or recombinantly, by in vitro or in vivo transcription.

[0062] Nucleotide analogs can be incorporated into cDNAs by methods well known in the art. The only requirement is that the incorporated analog must base pair with native purines or pyrimidines. For example, 2, 6-diaminopurine can substitute for adenine and form stronger bonds with thymidine than those between adenine and thymidine. A weaker pair is formed when hypoxanthine is substituted for guanine and base pairs with cytosine. Additionally, cDNAs can include nucleotides that have been derivatized chemically or enzymatically.

[0063] cDNAs can be synthesized on a substrate. Synthesis on the surface of a substrate may be accomplished using a chemical coupling procedure and a piezoelectric printing apparatus as described by Baldeschweiler et al. (PCT publication WO95/251116). Alternatively, the cDNAs can be synthesized on a substrate surface using a self-addressable electronic device that controls when reagents are added as described by Heller et al. (U.S. Pat. No. 5,605,662). cDNAs can be synthesized directly on a substrate by sequentially dispensing reagents for their synthesis on the substrate surface or by dispensing preformed DNA fragments to the substrate surface. Typical dispensers include a micropipette delivering solution to the substrate with a robotic system to control the position of the micropipette with respect to the substrate. There can be a multiplicity of dispensers so that reagents can be delivered to the reaction regions efficiently.

[0064] cDNAs can be immobilized on a substrate by covalent means such as by chemical bonding procedures or UV irradiation. In one method, a cDNA is bound to a glass surface which has been modified to contain epoxide or aldehyde groups. In another method, a cDNA is placed on a polylysine coated surface and UV cross-linked to it as described by Shalon et al. (WO95/35505). In yet another method, a cDNA is actively transported from a solution to a given position on a substrate by electrical means (Heller, supra). cDNAs do not have to be directly bound to the substrate, but rather can be bound to the substrate through a linker group. The linker groups are typically about 6 to 50 atoms long to provide exposure of the attached cDNA. Preferred linker groups include ethylene glycol oligomers, diamines, diacids and the like. Reactive groups on the substrate surface react with a terminal group of the linker to bind the linker to the substrate. The other terminus of the linker is then bound to the cDNA. Alternatively, polynucleotides, plasmids or cells can be arranged on a filter. In the latter case, cells are lysed, proteins and cellular components degraded, and the DNA is coupled to the filter by UV cross-linking.

[0065] The cDNAs may be used for a variety of purposes. For example, the combination of the invention may be used on an array. The array, in turn, can be used in high-throughput methods for detecting an identical or related polynucleotide in a sample, screening a plurality of molecules or compounds to identify a ligand, diagnosing a liver disorder, or inhibiting or inactivating a therapeutically relevant gene related to the cDNA.

[0066] When the cDNAs of the invention are employed on a microarray, the cDNAs are arranged in an ordered fashion so that each cDNA is present at a specified location. Because the cDNAs are at specified locations on the substrate, the hybridization patterns and intensities, which together create a unique expression profile, can be interpreted in terms of expression levels of particular genes and can be correlated with a particular metabolic process, condition, disorder, disease, stage of disease, or treatment. Hybridization

[0067] The cDNAs or fragments or complements thereof may be used in various hybridization technologies. The cDNAs may be labeled using a variety of reporter molecules by either PCR, recombinant, or enzymatic techniques. For example, a commercially available vector containing the cDNA is transcribed in the presence of an appropriate polymerase, such as T7 or SP6 polymerase, and at least one labeled nucleotide. Commercial kits are available for labeling and cleanup of such cDNAs. Radioactive (Amersham Pharmacia Biotech (APB), Piscataway N.J.), fluorescent (Operon Technologies, Alameda Calif.), and chemiluminescent labeling (Promega, Madison Wis.) are well known in the art.

[0068] A cDNA may represent the complete coding region of an mRNA or be designed or derived from unique regions of the mRNA or genomic molecule, an intron, a 3′ untranslated region, or from a conserved motif. The cDNA is at least 18 contiguous nucleotides in length and is usually single stranded. Such a cDNA may be used under hybridization conditions that allow binding only to an identical sequence, a naturally occurring molecule encoding the same protein, or an allelic variant. Discovery of related human and mammalian sequences may also be accomplished using a pool of degenerate cDNAs and appropriate hybridization conditions. Generally, a cDNA for use in Southern or northern hybridizations may be from about 400 to about 6000 nucleotides long. Such cDNAs have high binding specificity in solution-based or substrate-based hybridizations. An oligonucleotide, a fragment of the cDNA, may be used to detect a polynucleotide in a sample using PCR.

[0069] The stringency of hybridization is determined by G+C content of the cDNA, salt concentration, and temperature. In particular, stringency is increased by reducing the concentration of salt or raising the hybridization temperature. In solutions used for some membrane based hybridizations, addition of an organic solvent such as formamide allows the reaction to occur at a lower temperature. Hybridization may be performed with buffers, such as 5× saline sodium citrate (SSC) with 1% sodium dodecyl sulfate (SDS) at 60° C., that permit the formation of a hybridization complex between nucleic acid sequences that contain some mismatches. Subsequent washes are performed with buffers such as 0.2×SSC with 0.1 % SDS at either 45° C. (medium stringency) or 65°-68° C. (high stringency). At high stringency, hybridization complexes will remain stable only where the nucleic acid molecules are completely complementary. In some membrane-based hybridizations, preferably 35% or most preferably 50%, formamide may be added to the hybridization solution to reduce the temperature at which hybridization is performed. Background signals may be reduced by the use of detergents such as Sarkosyl or Triton X-100 (Sigma-Aldrich, St. Louis Mo.) and a blocking agent such as denatured salmon sperm DNA. Selection of components and conditions for hybridization are well known to those skilled in the art and are reviewed in Ausubel et al. (1997, Short Protocols in Molecular Biology, John Wiley & Sons, New York N.Y., Units 2.8-2.11, 3.18-3.19 and 4.6-4.9).

[0070] Dot-blot, slot-blot, low density and high density arrays are prepared and analyzed using methods known in the art. cDNAs from about 18 consecutive nucleotides to about 5000 consecutive nucleotides in length are contemplated by the invention and used in array technologies. The preferred number of cDNAs on an array is at least about 100,000, a more preferred number is at least about 40,000, an even more preferred number is at least about 10,000, and a most preferred number is at least about 600 to about 800. The array may be used to monitor the expression level of large numbers of genes simultaneously and to identify genetic variants, mutations, and SNPs. Such information may be used to determine gene function; to understand the genetic basis of a disorder; to diagnose a disorder; and to develop and monitor the activities of therapeutic agents being used to control or cure a disorder. (See, e.g., U.S. Pat. No. 5,474,796; WO95/11995; WO95/35505; U.S. Pat. No. 5,605,662; and U.S. Pat. No. 5,958,342.)

[0071] Screening and Purification Assays

[0072] A cDNA may be used to screen a library or a plurality of molecules or compounds for a ligand which specifically binds the cDNA. Ligands may be DNA molecules, RNA molecules, peptide nucleic acid molecules, peptides, proteins such as transcription factors, promoters, enhancers, repressors, and other proteins that regulate replication, transcription, or translation of a gene in a biological system. The assay involves combining the cDNA or a fragment thereof with the molecules or compounds under conditions that allow specific binding and detecting the bound cDNA to identify at least one ligand that specifically binds the cDNA.

[0073] In one embodiment, the cDNA may be incubated with a library of isolated and purified molecules or compounds and binding activity determined by methods such as a gel-retardation assay (U.S. Pat. No. 6,010,849) or a reticulocyte lysate transcriptional assay. In another embodiment, the cDNA may be incubated with nuclear extracts from biopsied and/or cultured cells and tissues. Specific binding between the cDNA and a molecule or compound in the nuclear extract is initially determined by gel shift assay. Protein binding may be confirmed by raising antibodies against the protein and adding the antibodies to the gel-retardation assay where specific binding will cause a supershift in the assay.

[0074] In another embodiment, the cDNA may be used to purify a molecule or compound using affinity chromatography methods well known in the art. In one embodiment, the cDNA is chemically reacted with cyanogen bromide groups on a polymeric resin or gel. Then a sample is passed over and reacts with or binds to the cDNA. The molecule or compound which is bound to the cDNA may be released from the cDNA by increasing the salt concentration of the flow-through medium and collected.

[0075] The cDNA may be used to purify a ligand from a sample. A method for using a cDNA to purify a ligand would involve combining the cDNA or a fragment thereof with a sample under conditions to allow specific binding, recovering the bound cDNA, and using an appropriate agent to separate the cDNA from the purified ligand.

[0076] Protein Production and Uses

[0077] The full length cDNAs or fragment thereof may be used to produce purified proteins using recombinant DNA technologies described herein and taught in Ausubel et al. (supra; Units 16.1-16.62). One of the advantages of producing proteins by these procedures is the ability to obtain highly-enriched sources of the proteins thereby simplifying purification procedures.

[0078] The proteins may contain amino acid substitutions, deletions or insertions made on the basis of similarity in polarity, charge, solubility, hydrophobicity, hydrophilicity, and/or the amphipathic nature of the residues involved. Such substitutions may be conservative in nature when the substituted residue has structural or chemical properties similar to the original residue (e.g., replacement of leucine with isoleucine or valine) or they may be nonconservative when the replacement residue is radically different (e.g., a glycine replaced by a tryptophan). Computer programs included in LASERGENE software (DNASTAR, Madison Wis.), MACVECTOR software (Genetics Computer Group, Madison Wis.) and RasMol software (University of Massachusetts, Amherst Mass.) may be used to help determine which and how many amino acid residues in a particular portion of the protein may be substituted, inserted, or deleted without abolishing biological or immunological activity.

[0079] Expression of Encoded Proteins

[0080] Expression of a particular cDNA may be accomplished by cloning the cDNA into a vector and transforming this vector into a host cell. The cloning vector used for the construction of cDNA libraries in the LIFESEQ databases may also be used for expression. Such vectors usually contain a promoter and a polylinker useful for cloning, priming, and transcription. An exemplary vector may also contain the promoter for β-galactosidase, an amino-terminal methionine and the subsequent seven amino acid residues of β-galactosidase. The vector may be transformed into competent E. coli cells. Induction of the isolated bacterial strain with isopropylthiogalactoside (IPTG) using standard methods will produce a fusion protein that contains an N terminal methionine, the first seven residues of β-galactosidase, about 15 residues of linker, and the protein encoded by the cDNA.

[0081] The cDNA may be shuttled into other vectors known to be useful for expression of protein in specific hosts. Oligonucleotides containing cloning sites and fragments of DNA sufficient to hybridize to stretches at both ends of the cDNA may be chemically synthesized by standard methods. These primers may then be used to amplify the desired fragments by PCR. The fragments may be digested with appropriate restriction enzymes under standard conditions and isolated using gel electrophoresis. Alternatively, similar fragments are produced by digestion of the cDNA with appropriate restriction enzymes and filled in with chemically synthesized oligonucleotides. Fragments of the coding sequence from more than one gene may be ligated together and expressed.

[0082] Signal sequences that dictate secretion of soluble proteins are particularly desirable as component parts of a recombinant sequence. For example, a chimeric protein may be expressed that includes one or more additional purification-facilitating domains. Such domains include, but are not limited to, metal-chelating domains that allow purification on immobilized metals, protein A domains that allow purification on immobilized immunoglobulin, and the domain utilized in the FLAGS extension/affinity purification system (Immunex, Seattle Wash.). The inclusion of a cleavable-linker sequence such as ENTEROKINASEMAX (Invitrogen, San Diego Calif.) between the protein and the purification domain may also be used to recover the protein.

[0083] Suitable host cells may include, but are not limited to, mammalian cells such as Chinese Hamster Ovary (CHO) and human 293 cells, insect cells such as Sf9 cells, plant cells such as Nicotiana tabacum, yeast cells such as Saccharomyces cerevisiae, and bacteria such as E. coli. For each of these cell systems, a useful vector may also include an origin of replication and one or two selectable markers to allow selection in bacteria as well as in a transformed eukaryotic host. Vectors for use in eukaryotic host cells may require the addition of 3′ poly(A) tail if the cDNA lacks poly(A).

[0084] Additionally, the vector may contain promoters or enhancers that increase gene expression. Many promoters are known and used in the art. Most promoters are host specific and exemplary promoters includes SV40 promoters for CHO cells; T7 promoters for bacterial hosts; viral promoters and enhancers for plant cells; and PGH promoters for yeast. Adenoviral vectors with the rous sarcoma virus enhancer or retroviral vectors with long terminal repeat promoters may be used to drive protein expression in mammalian cell lines. Once homogeneous cultures of recombinant cells are obtained, large quantities of secreted soluble protein may be recovered from the conditioned medium and analyzed using chromatographic methods well known in the art. An alternative method for the production of large amounts of secreted protein involves the transformation of mammalian embryos and the recovery of the recombinant protein from milk produced by transgenic cows, goats, sheep, and the like.

[0085] In addition to recombinant production, proteins or portions thereof may be produced manually, using solid-phase techniques (Stewart et al. (1969) Solid-Phase Peptide Synthesis, W H Freeman, San Francisco Calif.; Merrifield (1963) J Am Chem Soc 5:2149-2154), or using machines such as the ABI 431A peptide synthesizer (Applied Biosystems (ABI), Foster City Calif.). Proteins produced by any of the above methods may be used as pharmaceutical compositions to treat disorders associated with null or inadequate expression of the genomic sequence.

[0086] Production of Antibodies

[0087] A protein encoded by a cDNA of the invention may be used to produce specific antibodies. Antibodies may be produced using an oligopeptide or a portion of the protein with inherent immunological activity. Methods for producing antibodies include: 1) injecting an animal, usually goats, rabbits, or mice, with the protein, or an antigenically-effective portion or an oligopeptide thereof, to induce an immune response; 2) engineering hybridomas to produce monoclonal antibodies; 3) inducing in vivo production in the lymphocyte population; or 4) screening libraries of recombinant immunoglobulins. Recombinant immunoglobulins may be produced as taught in U.S. Pat. No. 4,816,567.

[0088] Antibodies produced using the proteins of the invention are useful for the diagnosis of prepathologic disorders as well as the diagnosis of chronic or acute diseases characterized by abnormalities in the expression, amount, or distribution of the protein. A variety of protocols for competitive binding or immunoradiometric assays using either polyclonal or monoclonal antibodies specific for proteins are well known in the art. Immunoassays typically involve the formation of complexes between a protein and its specific binding molecule or compound and the measurement of complex formation. Immunoassays may employ a two-site, monoclonal-based assay that utilizes monoclonal antibodies reactive to two noninterfering epitopes on a specific protein or a competitive binding assay (Pound (1998) Immunochemical Protocols, Humana Press, Totowa N.J.).

[0089] Immunoassay procedures may be used to quantify expression of the protein in cell cultures, in subjects with a particular disorder or in model animal systems under various conditions. Increased or decreased production of proteins as monitored by immunoassay may contribute to knowledge of the cellular activities associated with developmental pathways, engineered conditions or diseases, or treatment efficacy. The quantity of a given protein in a given tissue may be determined by performing immunoassays on freeze-thawed detergent extracts of biological samples and comparing the slope of the binding curves to binding curves generated by purified protein.

[0090] Labeling of Molecules for Assay

[0091] A wide variety of reporter molecules and conjugation techniques are known by those skilled in the art and may be used in various cDNA, polynucleotide, protein, peptide or antibody assays. Synthesis of labeled molecules may be achieved using commercial kits for incorporation of a labeled nucleotide such as ³²P-dCTP, Cy3-dCTP or Cy5-dCTP or amino acid such as ³⁵S-methionine. Polynucleotides, cDNAs, proteins, or antibodies may be directly labeled with a reporter molecule by chemical conjugation to amines, thiols and other groups present in the molecules using reagents such as BIODIPY or FITC (Molecular Probes, Eugene Oreg.).

[0092] The proteins and antibodies may be labeled for purposes of assay by joining them, either covalently or noncovalently, with a reporter molecule that provides for a detectable signal. A wide variety of labels and conjugation techniques are known and have been reported in the scientific and patent literature including, but not limited to U.S. Pat. Nos. 3,817,837; 3,850,752; 3,939,350; 3,996,345; 4,277,437; 4,275,149; and 4,366,241.

[0093] Diagnostics

[0094] The cDNAs, or fragments thereof, may be used to detect and quantify differential gene expression; absence, presence, or excess expression of mRNAs; or to monitor mRNA levels during therapeutic intervention. Disorders associated with altered expression include biliary cirrhosis, X-linked adrenoleukodystrophy, Zellweger syndrome, hepatorenal syndrome, hepatitis, and hepatocarcinoma. These cDNAs can also be utilized as markers of treatment efficacy against the disorders noted above and other disorders, conditions, and diseases over a period ranging from several days to months. The diagnostic assay may use hybridization or amplification technology to compare gene expression in a biological sample from a patient to standard samples in order to detect altered gene expression. Qualitative or quantitative methods for this comparison are well known in the art.

[0095] For example, the cDNA may be labeled by standard methods and added to a biological sample from a patient under conditions for hybridization complex formation. After an incubation period, the sample is washed and the amount of label (or signal) associated with hybridization complexes is quantified and compared with a standard value. If the amount of label in the patient sample is significantly altered in comparison to the standard value, then the presence of the associated condition, disease or disorder is indicated.

[0096] In order to provide a basis for the diagnosis of a condition, disease or disorder associated with gene expression, a normal or standard expression profile is established. This may be accomplished by combining a biological sample taken from normal subjects, either animal or human, with a probe under conditions for hybridization or amplification. Standard hybridization may be quantified by comparing the values obtained using normal subjects with values from an experiment in which a known amount of molecule is used. Standard values obtained in this manner may be compared with values obtained from samples from patients who are symptomatic for a particular condition, disease, or disorder. Deviation from standard values toward those associated with a particular condition is used to diagnose that condition.

[0097] Such assays may also be used to evaluate the efficacy of a particular therapeutic treatment regimen in animal studies and in clinical trial or to monitor the treatment of an individual patient. Once the presence of a condition is established and a treatment protocol is initiated, diagnostic assays may be repeated on a regular basis to determine if the level of expression in the patient begins to approximate that which is observed in a normal subject. The results obtained from successive assays may be used to show the efficacy of treatment over a period ranging from several days to months.

[0098] Gene Expression Profiles A gene expression profile comprises a plurality of cDNAs and a plurality of detectable hybridization complexes, wherein each complex is formed by hybridization of one or more probes to one or more complementary sequences in a sample. The cDNAs of the invention are used as elements on a microarray to analyze gene expression profiles. In one embodiment, the microarray is used to monitor the progression of disease. Researchers can assess and catalog the differences in gene expression between healthy and diseased tissues or cells. By analyzing changes in patterns of gene expression, disease can be diagnosed at earlier stages before the patient is symptomatic. The invention can be used to formulate a prognosis and to design a treatment regimen. The invention can also be used to monitor the efficacy of treatment. For treatments with known side effects, the microarray is employed to improve the treatment regimen. A dosage is established that causes a change in genetic expression patterns indicative of successful treatment. Expression patterns associated with the onset of undesirable side effects are avoided. This approach may be more sensitive and rapid than waiting for the patient to show inadequate improvement, or to manifest side effects, before altering the course of treatment.

[0099] In another embodiment, animal models which mimic a human disease can be used to characterize expression profiles associated with a particular condition, disorder or disease; or treatment of the condition, disorder or disease. Novel treatment regimens may be tested in these animal models using microarrays to establish and then follow expression profiles over time. In addition, microarrays may be used with cell cultures or tissues removed from animal models to rapidly screen large numbers of candidate drug molecules, looking for ones that produce an expression profile similar to those of known therapeutic drugs, with the expectation that molecules with the same expression profile will likely have similar therapeutic effects. Thus, the invention provides the means to rapidly determine the molecular mode of action of a drug.

[0100] Assays Using Antibodies

[0101] Antibodies directed against epitopes on a protein encoded by a cDNA of the invention may be used in assays to quantify the amount of protein found in a particular human cell. Such assays include methods utilizing the antibody and a label to detect expression level under normal or disease conditions. The antibodies may be used with or without modification, and labeled by joining them, either covalently or noncovalently, with a labeling moiety.

[0102] Protocols for detecting and measuring protein expression using either polyclonal or monoclonal antibodies are well known in the art. Examples include ELISA, RIA, and fluorescent activated cell sorting (FACS). Such immunoassays typically involve the formation of complexes between the protein and its specific antibody and the measurement of such complexes. These and other assays are described in Pound (supra). The method may employ a two-site, monoclonal-based immunoassay utilizing monoclonal antibodies reactive to two non-interfering epitopes, or a competitive binding assay. (See, e.g., Coligan et al. (1997) Current Protocols in Immunology, Wiley-Interscience, New York N.Y.; Pound, supra.)

[0103] Therapeutics

[0104] The cDNAs of the invention can be used in gene therapy. cDNAs can be delivered ex vivo to target cells, such as cells of bone marrow. Once stable integration and transcription and or translation are confirmed, the bone marrow may be reintroduced into the subject. Expression of the protein encoded by the cDNA may correct a disorder associated with mutation of an endogenous gene, reduction or loss of an endogenous protein, or overepression of an endogenous or mutant protein. Alternatively, cDNAs may be delivered in vivo using vectors such as retrovirus, adenovirus, adeno-associated virus, herpes simplex virus, and bacterial plasmids. Non-viral methods of gene delivery include cationic liposomes, polylysine conjugates, artificial viral envelopes, and direct injection of DNA (Anderson (1998) Nature 392:25-30; Dachs et al. (1997) Oncol Res 9:313-325; Chu et al. (1998) J Mol Med 76(3-4):184-192; Weiss et al. (1999) Cell Mol Life Sci 55(3):334-358; Agrawal (1996) Antisense Therapeutics, Humana Press, Totowa N.J.; and August et al. (1997) Gene Therapy (Advances in Pharmacology, Vol. 40), Academic Press, San Diego Calif.).

[0105] In addition, expression of a particular protein can be regulated through the specific binding of a fragment of a cDNA to a genomic sequence or an mRNA which encodes the protein or directs its transcription or translation. The cDNA can be modified or derivatized to any RNA-like or DNA-like material including peptide nucleic acids, branched nucleic acids, and the like. These molecules can be produced biologically by transforming an appropriate host cell with a vector containing the cDNA of interest.

[0106] Molecules which regulate the activity of the cDNA or encoded protein are useful as therapeutics for biliary cirrhosis, X-linked adrenoleukodystrophy, Zellweger syndrome, hepatorenal syndrome, hepatitis, and hepatocarcinoma. Such molecules include agonists which increase the expression or activity of the cDNA or encoded protein, respectively; or antagonists which decrease expression or activity of the cDNA or encoded protein, respectively. In one aspect, an antibody which specifically binds the protein may be used directly as an antagonist or indirectly as a delivery mechanism for bringing a pharmaceutical agent to cells or tissues which express the protein.

[0107] Additionally, any of the proteins, or their ligands, or complementary nucleic acid sequences may be administered as pharmaceutical compositions or in combination with other appropriate therapeutic agents. Selection of the appropriate agents for use in combination therapy may be made by one of ordinary skill in the art, according to conventional pharmaceutical principles. The combination of therapeutic agents may act synergistically to affect the treatment or prevention of the conditions and disorders associated with an immune response. Using this approach, one may be able to achieve therapeutic efficacy with lower dosages of each agent, thus reducing the potential for adverse side effects. Further, the therapeutic agents may be combined with pharmaceutically-acceptable carriers including excipients and auxiliaries which facilitate processing of the active compounds into preparations which can be used pharmaceutically. Further details on techniques for formulation and administration used by doctors and pharmacists may be found in the latest edition of Remington's Pharmaceutical Sciences (Mack Publishing, Easton Pa.).

[0108] Model Systems

[0109] Animal models may be used as bioassays where they exhibit a phenotypic response similar to that of humans and where exposure conditions are relevant to human exposures. Mammals are the most common models, and most infectious agent, cancer, drug, and toxicity studies are performed on rodents such as rats or mice because of low cost, availability, lifespan, reproductive potential, and abundant reference literature. Inbred and outbred rodent strains provide a convenient model for investigation of the physiological consequences of underexpression or overexpression of genes of interest and for the development of methods for diagnosis and treatment of diseases. A mammal inbred to overexpress a particular gene (for example, secreted in milk) may also serve as a convenient source of the protein expressed by that gene.

[0110] Transgenic Animal Models

[0111] Transgenic rodents that overexpress or underexpress a gene of interest may be inbred and used to model human diseases or to test therapeutic or toxic agents. (See, e.g., U.S. Pat. No. 5,175,383 and U.S. Pat. No. 5,767,337.) In some cases, the introduced gene may be activated at a specific time in a specific tissue type during fetal or postnatal development. Expression of the transgene is monitored by analysis of phenotype, of tissue-specific mRNA expression, or of serum and tissue protein levels in transgenic animals before, during, and after challenge with experimental drug therapies.

[0112] Embryonic Stem Cells

[0113] Embryonic (ES) stem cells isolated from rodent embryos retain the potential to form embryonic tissues. When ES cells such as the mouse 129/SvJ cell line are placed in a blastocyst from the C57BL/6 mouse strain, they resume normal development and contribute to tissues of the live-born animal. ES cells are preferred for use in the creation of experimental knockout and knockin animals. The method for this process is well known in the art and the steps are: the cDNA is introduced into a vector, the vector is transformed into ES cells, transformed cells are identified and microinjected into mouse cell blastocysts, blastocysts are surgically transferred to pseudopregnant dams. The resulting chimeric progeny are genotyped and bred to produce heterozygous or homozygous strains.

[0114] Knockout Analysis

[0115] In gene knockout analysis, a region of a gene is enzymatically modified to include a non-natural intervening sequence such as the neomycin phosphotransferase gene (neo; Capecchi (1989) Science 244:1288-1292). The modified gene is transformed into cultured ES cells and integrates into the endogenous genome by homologous recombination. The inserted sequence disrupts transcription and translation of the endogenous gene.

[0116] Knockin Analysis

[0117] ES cells can be used to create knockin humanized animals or transgenic animal models of human diseases. With knockin technology, a region of a human gene is injected into animal ES cells, and the human sequence integrates into the animal cell genome. Transgenic progeny or inbred lines are studied and treated with potential pharmaceutical agents to obtain information on the progression and treatment of the analogous human condition.

[0118] As described herein, the uses of the cDNAs, provided in the Sequence Listing of this application, and their encoded proteins are exemplary of known techniques and are not intended to reflect any limitation on their use in any technique that would be known to the person of average skill in the art. Furthermore, the cDNAs provided in this application may be used in molecular biology techniques that have not yet been developed, provided the new techniques rely on properties of nucleotide sequences that are currently known to the person of ordinary skill in the art, e.g., the triplet genetic code, specific base pair interactions, and the like. Likewise, reference to a method may include combining more than one method for obtaining or assembling full length cDNAs that will be known to those skilled in the art. It is also to be understood that this invention is not limited to the particular methodology, protocols, and reagents described, as these may vary. It is also understood that the terminology used herein is for the purpose of describing particular embodiments only, and is not intended to limit the scope of the present invention which will be limited only by the appended claims. The examples below are provided to illustrate the subject invention and are not included for the purpose of limiting the invention.

### EXAMPLES

[0119] I cDNA Library Construction

[0120] The RALINOT01 cDNA library was constructed from liver tissue removed from a pool of fifty 10- to 11-week-old SPRAGUE DAWLEY female rats (Pharmacon, Waverly Pa.). The animals were housed in standard laboratory caging and fed PMI-certified Rodent Diet #5002. The animals appeared to be in good health at the time tissue was harvested. The animals were anesthetized by CO₂ inhalation, and then cardiocentesis was performed.

[0121] Frozen tissue was homogenized and lysed in TRIZOL reagent (1 g tissue/10 ml TRIZOL; Invitrogen) using a POLYTRON homogenizer (PT-3000; Brinkmann Instruments, Westbury N.Y.). After a brief incubation on ice, chloroform (1:5 v/v) was mixed with the reagent, and then centrifuged at 1,000 rpm. The upper aqueous layer was removed to a fresh tube, and the RNA precipitated with isopropanol, resuspended in DEPC-treated water, and treated with DNAse I for 25 min at 37 C. The RNA was re-extracted once with phenol-chloroform, pH 4.7, and precipitated using 0.3 M sodium acetate and 2.5 volumes ethanol. The mRNA was then isolated using an OLIGOTEX kit (Qiagen, Chatsworth Calif.) and used to construct the cDNA library.

[0122] The mRNA was handled according to the recommended protocols in the SUPERSCRIPT plasmid system ( Invitrogen). The cDNAs were fractionated on a SEPHAROSE CL-4B column (APB), and those cDNAs exceeding 400 bp were ligated into the pINCY1 plasmid vector (Incyte Genomics). The plasmid pINCY1 was subsequently transformed into DH5α or DH10B competent cells (Invitrogen).

[0123] The RAKINOT01 library was constructed using mRNA isolated from kidney tissue removed from a pool of fifty, 7- to 8-week-old male Sprague-Dawley rats, as described above.

[0124] The RAKINOT02 library was constructed using mRNA isolated from kidney tissue removed from a pool of fifty, 10- to 11-week-old female Sprague-Dawley rats, as described above.

[0125] II cDNA Library Normalization

[0126] The RALINOT01 cDNA library was normalized in a single round according to the procedure of Soares et al. (1994, Proc Natl Acad Sci 91:9228-9232) with the following modifications. The primer to template ratio in the primer extension reaction was increased from 2:1 to 10:1. The concentration of each dNTP in the reaction was adjusted to 150 μM to allow for generation of longer (400-1000 nucleotide (nt)) primer extension products and reannealing hybridization was extended from thirteen to forty eight hours. The single stranded DNA circles of the normalized library were purified by hydroxyapatite chromatography, converted to partially double-stranded by random priming, and electroporated into DH10B competent bacteria (Invitrogen).

[0127] The Soares normalization procedure is designed to reduce the initial variation in individual cDNA frequencies and to achieve abundances within one order of magnitude while maintaining the overall sequence complexity of the library. In the normalization process, the prevalence of high-abundance cDNA clones decreases significantly, clones with mid-level abundance are relatively unaffected, and clones for rare transcripts are increased in abundance. In the modified Soares normalization procedure, significantly longer hybridization times are used to increase gene discovery rates by biasing the normalized libraries toward low-abundance cDNAs that are well represented in a standard transcript image.

[0128] The RALINON03, RALINON04, and RALINON07 normalized rat liver cDNA libraries were constructed with 2.0×10⁶, 4.6×10⁵, and 2.0×10⁶ independent clones from the RALINOT01 cDNA library, respectively.

[0129] III cDNA Library Prehybridization

[0130] The RALINOH01 cDNA library was constructed with clones from the RALINOT01 cDNA library. After preparation of the RALINOT01 cDNA library, 9,984 clones were spotted onto a nylon filter, lysed, and the plasmid DNA was bound to the filter. The filter was incubated with pre-warmed hybridization buffer and then hybridized at 42 C. for 14-16 hours in 0.75 M NaCl, 0.1 M Na₂HPO₄/NaH₂PO₄, 0.15 M tris-HCl (pH 7.5), 5× Denhardt's Solution, 2% SDS, 100 μg/ml sheared salmon sperm DNA, 50% formamide, and [³²P]-labeled oligonucleotide molecules made from reverse transcribed rat liver mRNA from an untreated animal. The filter was rinsed with 2×SSC at ambient temperature for 5 minutes followed by washing for 30 minutes at 68 C. with pre-warmed washing solution (2×SSC, 1% SDS). The wash was repeated with fresh washing solution for an additional 30 minutes at 68 C. Filters were then washed twice with pre-warmed washing solution (0.6×SSC, 1% SDS) for 30 minutes at 68 C. Some 4,224 clones had very low hybridization signals and about 20% of the clones had no signals and these two groups were isolated and sequenced.

[0131] IV Isolation and Sequencing of cDNA Clones

[0132] DNA was isolated using the following protocol. Single bacterial colonies were transferred into individual wells of 384-well plates (Genetix Ltd, Christchurch, United Kingdom) using sterile toothpicks.

[0133] The wells contained 1 ml of sterile TERRIFIC BROTH (BD Biosciences, San Jose Calif.) with 25 mg/l carbenicillin and 0.4% glycerol (v/v). The plates were covered and placed in an incubator (Thermodyne, Newtown Square Pa.) at 37 C. for 8-10 hours. Plasmid DNA was released from the cells and amplified using direct link PCR (Rao, V. B. (1994) Anal. Biochem. 216:1-14) as follows. The direct link PCR solution included 30 ml of NUCLEIX PLUS PCR nucleotide mix (APB) and 300 μl of Taq DNA polymerase (APB). Five microlitres of the PCR solution were added to each of the 384 wells using the MICROLAB 2200 system (Hamilton, Reno Nev.); plates were centrifuged at 1000 rpm for 20 seconds and refrigerated until use. A 384 pin tool (V&P Scientific, San Diego Calif.) was used to transfer bacterial cells from the incubation plate into the plate containing the PCR solution where 0.1% Tween 20 caused the cells to undergo lysis and release the plasmid DNA. After lysis, the plates were centrifuged up to 500 rpm, covered with a cycle sealer, and cycled using a 384-well DNA ENGINE thermal cycler (M J Research, Watertown Mass.) using the program dPCR30 with the following parameters: Step 1) 95 C., 1 minute; Step 2) 94 C., 30 seconds; Step 3) 55 C., 30 seconds; Step 4) 72 C., 2 minutes; Step 5) steps 2, 3, and 4 repeated 29 times; Step 6) 72 C., 10 minutes; and Step 7) storage at 4 C.

[0134] The concentration of DNA in each well was determined by dispensing 100 μl PICO GREEN quantitation reagent (0.25% reagent in 1×TE, v/v; Molecular Probes) and 0.5 μl of undiluted PCR product into each well of an opaque fluorimeter plate (Coming Costar, Acton Mass.) and allowing the DNA to bind to the quantitation reagent. The plate was scanned in a Fluoroscan II (Labsystemns Oy, Helsinki, Finland) to measure the fluorescence of the sample and to quantitate the concentration of DNA. Typical concentrations of each DNA sample were in the range of 100 to 500 ng/ml.

[0135] The cDNAs were prepared for sequencing using either a HYDRA microdispenser (Robbins Scientific, Sunnyvale Calif.) or MICROLAB 2200 system (Hamilton) in combination with the DNA ENGINE thermal cyclers (M J Research). The cDNAs were sequenced using the method of Sanger and Coulson (J Mol Biol (1975) 94:441-448) and the ABI PRISM 377 sequencing systems (ABI). Most of the isolates were sequenced according to standard ABI protocols and kits using solution volumes at 0.25×-1.0× concentrations. In the alternative, cDNAs were sequenced using APB solutions and dyes.

[0136] V Rat Liver and Kidney Gene Selection

[0137] As a first step, originator molecules from high throughput sequencing experiments were derived from clone inserts from RALINOT01, RAKINOT01, RAKINOT02, RALINOH01, RALINON03, RALINON04 and RALINON07. cDNA library clones were obtained. There were 18,140 rat liver molecules and 5,779 rat kidney molecules.

[0138] Additionally, 1,500 rat molecules derived from clone inserts of any of 113 rat cDNA libraries were selected based on their homology to genes coding for polypeptides implicated in toxicological responses including peroxisome-associated genes, lysosome-associated genes, apoptosis-associated genes, cytochrome P450 genes, detoxification genes such as sulfotransferases, glutathione S-transferases, and cysteine proteases, and the like. Then, all the remaining molecules derived from all of the rat cDNA library clones were clustered based on the originator molecules described above. The clustering process involved identifying overlapping molecules that have a match quality indicated by a product score of 50 using BLAST. A total of 6581 master clusters were identified.

[0139] After clustering, a consensus sequence was produced using PHRAP (Phil Green, University of Washington). The assembled sequences were annotated using BLASTn and GenBank and FASTX and GenPept. About two thirds of the assembled sequences acquired annotation. For nucleic acid sequence analysis, BLASTN 1.4.9MP-WashU was used with default parameters; ctxfactor-2.00; E=10; MatID, 0; Matrix BLOSUM62, +5,−4. For amino acid sequence analysis, NCBI-BLASTX 2.0.4 was used with default parameters; matrix, BLOSUM62; gap penalties, existence 11, extension 1; frameshift window, decay constant 50, 0.1.

[0140] VI Treated Rat Liver Library Preparation

[0141] Male SPRAGUE DAWLEY rats (6-8 wk old) were dosed intraperitoneally with one of the following: clofibrate (CLO; Acros, Geel, Belgium) at 250 mg/kg body weight (bw); acetaminophen (APAP; Acros) at 1000 mg/kg bw; benzo(a)pyrene (B(a)P; Acros) at 10 mg/kg bw; or dimethylsulfoxide vehicle (DMSO; Acros) at less than 2 ml/kg bw. Animals were monitored daily for physical condition and body weight. Three animals per group were sacrificed approximately 12 hours, 24 hours, 3 days (d), 7d, 14d, and 28d following the single dose. Prior to sacrifice, a blood sample from each animal was drawn and assayed for serum alanine transferase (ALT) and serum aspartate aminotransferase (AST) levels using a diagnostic kit (Sigma-Aldrich). Observed gross pathology and liver weights were recorded at time of necropsy. Liver, kidney, brain, spleen and pancreas from each rat were harvested, flash frozen in liquid nitrogen, and stored at −80 C.

[0142] In the alternative, male Han/Wistar rats (8-9 wk old) were dosed by oral gavage with one of the following: fenofibrate (FEN; Sigma-Aldrich) at 250 mg/kg bw; carbon tetrachloride (CCL₄; Sigma-Aldrich) at 3160 mg/kg bw, hydrazine (HYDR; Sigma-Aldrich) at 120 mg/kg bw; α-naphthylisothiocyanate (ANIT; Sigma-Aldrich) at 200 mg/kg bw; 4-acetylaminofluorene (4-AFF; Lancaster Synthesis, Morecambe, Lancashire, UK) at 1000 mg/kg bw; corn oil vehicle or sterile water vehicle at 10 ml/kg bw. The animals were checked twice daily for clinical signs of distress. Blood was collected six days prior to the dose and at sacrifice. Three animals per group were sacrificed approximately six hours and twenty four hours following the single dose. The animals were euthanized by exsanguination under isoflurane anaesthesia. Observed gross pathology and liver weights were recorded at time of necropsy. Livers from each rat were harvested, dissected into approximate 100 mg pieces, flash frozen in liquid nitrogen, and stored at −70 C.

[0143] cDNA liver libraries were prepared and sequenced as described above and compared using transcript imaging (TI; Incyte Genomics). Master clusters which contained at least three clones were selected if those clones were present in a treated rat liver cDNA library, no more than one clone was present in an untreated rat liver cDNA library, and the master cluster was not annotated. A master cluster containing at least three clones was given the designation “Abundance=3” and was considered to have been upregulated at least 3-fold.

[0144] VII Results

[0145] The expression patterns of eight cytochrome P450 isozyme gene transcripts known to be induced in a toxicological response were monitored during a 28 day time course. Expression levels of gene transcripts from liver cDNA libraries from treated rats were compared with those from untreated rats. The results using clofibrate, acetaminophen, and benzo(a)pyrene are shown below in Tables 4, 5, and 6, respectively. Each of the known gene transcripts was upregulated or downregulated greater than 2-fold at least once during the time course as compared with untreated liver as control.

TABLE 4
Gene expression (fold change) of known
genes in clofibrate-treated rat liver

| Gene | 12 hours | 24 hours | 3 days | 7 days | 28 days |
|---|---|---|---|---|---|
| P450 LA-omega | 14.8 | 26.6 | 1.1 | 0.5 | 0.47 |
| 4A3 | | | | | |
| P450 4A | 7.0 | 16.6 | 1.4 | 0.5 | 1.3 |
| P450 3A2 | 0.14 | 1.2 | 0.63 | 0.50 | 0.45 |

[0146] TABLE 5
Gene expression (fold change) of known
genes in acetaminophen-treated rat liver

| Gene | 12 hours | 24 hours | 3 days | 7 days | 14 days | 28 days |
|---|---|---|---|---|---|---|
| P450 4A | 1.0 | 4.5 | 2.1 | 2.0 | 4.4 | 4.8 |
| P450f 2C7 | 0.21 | 0.43 | 0.47 | 0.5 | 1.2 | 1.3 |
| P450 | 0.31 | 0.20 | 2.0 | 1.1 | 1.4 | 0.42 |
| 14DM | | | | | | |

[0147] TABLE 6
Gene expression (fold change) of known
genes in benzo(a)pyrene-treated rat liver

| | 12 | 24 | 3 | 7 | 14 | 28 |
|---|---|---|---|---|---|---|
| Gene | hours | hours | days | days | days | days |
| P450 LA-omega 4A3 | 1.2 | 2.3 | 2.4 | 1.4 | 6.8 | 1.2 |
| P450 MCA-inducible 1A2 | 7.3 | 9.2 | 5.7 | 2.5 | 2.5 | 0.5 |

[0148] Novel cDNAs that are upregulated at least 3-fold at least once during the time course were identified. These cDNAs are SEQ ID NOs: 1-202 provided in the Sequence Listing. These cDNAs can be used to diagnose, stage, or treat a liver disorder, to monitor diagnostic and therapeutic applications, to detect metabolic and toxicological responses, and to elucidate drug mechanism of action.

[0149] Table 1 shows the cDNAs that were upregulated at least 3-fold at least once during the time course of treatment with at least one of the following: BP; APAP; CLO; Feno; CCl4; Hydra; ANIT; 4-AFF. Abundance of a particular cDNA in the library profile was determined by summing the total number of copies of the clones present in the master cluster in that library.

[0150] VIII Identification and Analyses of Homologous Molecule in other Organisms

[0151] The rat cDNAs (SEQ ID NOs: 1-202) identified in the ZOOSEQ v.1.4 (October 1999) database were used to identify related cDNAs and templates in the ZOOSEQ 5.0 and LIFESEQ GOLD databases (Incyte Genomics) which are induced and/or differentially expressed during toxicological response. Table 2 shows the rat and human cDNAs and templates identified using BLAST (SEQ ID NOs: 1-514). Table 3 shows the percentage tissue distribution of the human cDNAs.

[0152] IX Construction of Human cDNA Libraries

[0153] RNA was purchased from Clontech Laboratories (Palo Alto Calif.) or isolated from various tissues. Some tissues were homogenized and lysed in guanidinium isothiocyanate, while others were homogenized and lysed in phenol or in a suitable mixture of denaturants, such as TRIZOL reagent (Invitrogen). The resulting lysates were centrifuged over CsCl cushions or extracted with chloroform. RNA was precipitated with either isopropanol or ethanol and sodium acetate, or by other routine methods.

[0154] Phenol extraction and precipitation of RNA were repeated as necessary to increase RNA purity. In most cases, RNA was treated with DNAse. For most libraries, poly(A) RNA was isolated using oligo d(T)-coupled paramagnetic particles (Promega), OLIGOTEX latex particles (Qiagen, Valencia Calif.), or an OLIGOTEX mRNA purification kit (Qiagen). Alternatively, poly(A) RNA was isolated directly from tissue lysates using other kits, including the POLY(A)PURE mRNA purification kit (Ambion, Austin Tex.).

[0155] In some cases, Stratagene (La Jolla Calif.) was provided with RNA and constructed the corresponding cDNA libraries. Otherwise, cDNA was synthesized and cDNA libraries were constructed with the UNIZAP vector system (Stratagene) or SUPERSCRIPT plasmid system (Invitrogen) using the recommended procedures or similar methods known in the art. (See Ausubel, supra, Units 5.1 through 6.6.) Reverse transcription was initiated using oligo d(T) or random primers. Synthetic oligonucleotide adapters were ligated to double stranded cDNA, and the cDNA was digested with the appropriate restriction enzyme or enzymes. For most libraries, the cDNA was size-selected (300-1000 bp) using SEPHACRYL S1000, SEPHAROSE CL2B, or SEPHAROSE CL4B column chromatography (APB) or preparative agarose gel electrophoresis. cDNAs were ligated into compatible restriction enzyme sites of the polylinker of the pBLUESCRIPT phagemid (Stratagene), pSPORT1 plasmid (Invitrogen), or pINCY plasmid (Incyte Genomics). Recombinant plasmids were transformed into XL1-BLUE, XL1-BLUEMRF, or SOLR competent E. coli cells (Stratagene) or DH5α, DH10B, or ELECTROMAX DH10B competent E. coli cells (Invitrogen).

[0156] In some cases, libraries were superinfected with a 5-fold excess of the helper phage, M13K07, according to the method of Vieira et al. (1987, Methods Enzymol 153:3-11) and normalized or subtracted using a methodology adapted from Soares (supra), Swaroop et al. (1991, Nucl Acids Res 19:1954), and Bonaldo et al. (1996, Genome Res 6:791-806). The modified Soares normalization procedure was utilized to reduce the repetitive cloning of highly expressed high abundance cDNAs while maintaining the overall complexity of the library. Modification included significantly longer hybridization times which allowed for increased gene discovery rates by biasing the normalized libraries toward those infrequently expressed low-abundance cDNAs which are poorly represented in a standard transcript image.

[0157] X Isolation and Sequencing of cDNA Clones

[0158] Plasmids were recovered from host cells by in vivo excision using the UNIZAP vector system (Stratagene) or by cell lysis. Plasmids were purified using one of the following: the Magic or WIZARD MINIPREPS DNA purification system (Promega); the AGTC MINIPREP purification kit (Edge BioSystems, Gaithersburg Md.); the QIAWELL 8, QIAWELL 8 Plus, or QIAWELL 8 Ultra plasmid purification systems, or the REAL PREP 96 plasmid purification kit (Qiagen). Following precipitation, plasmids were resuspended in 0.1 ml of distilled water and stored, with or without lyophilization, at 4 C.

[0159] Alternatively, plasmid DNA was amplified from host cell lysates using direct link PCR in a high-throughput format (Rao (1994) Anal Biochem 216:1-14). Host cell lysis and thermal cycling steps were carried out in a single reaction mixture. Samples were processed and stored in 384-well plates, and the concentration of amplified plasmid DNA was quantified fluorometrically using PICOGREEN dye (Molecular Probes) and a FLUOROSKAN II fluorescence scanner (Labsystems Oy, Helsinki, Finland).

[0160] cDNA sequencing reactions were processed using standard methods or high-throughput instrumentation such as the ABI CATALYST 800 thermal cycler (ABI) or the DNA ENGINE thermal cycler (M J Research, Watertown Mass.) in conjunction with the HYDRA microdispenser (Robbins Scientific, Sunnyvale Calif.) or the MICROLAB 2200 system (Hamilton). cDNA sequencing reactions were prepared using reagents provided by APB or supplied in ABI sequencing kits such as the ABI PRISM BIGDYE cycle sequencing kit (ABI). Electrophoretic separation of cDNA sequencing reactions and detection of labeled cDNAs were carried out using the MEGABACE 1000 DNA sequencing system (APB); the ABI PRISM 373 or 377 sequencing systems (ABI) in conjunction with standard ABI protocols and base calling software; or other sequence analysis systems known in the art. Reading frames within the cDNAs were identified using standard methods (reviewed in Ausubel, supra, Unit 7.7).

[0161] XI Extension of cDNAs

[0162] Nucleic acid sequences were extended using the cDNAs and oligonucleotide primers. One primer was synthesized to initiate 5′ extension of the known fragment, and the other, to initiate 3′ extension of the known fragment. The initial primers were designed using OLIGO primer analysis software (Molecular Biology Insights, Cascade Colo.), or another appropriate program, to be about 22 to 30 nucleotides in length, to have a GC content of about 50% or more, and to anneal to the cDNA at temperatures of about 68 C. to about 72 C. Any stretch of nucleotides which would result in hairpin structures and primer-primer dimerizations was avoided.

[0163] Selected human cDNA libraries were used to extend the sequence. If more than one extension was necessary or desired, additional or nested sets of primers were designed. Preferred libraries are ones that have been size-selected to include larger cDNAs. Also, random primed libraries are preferred because they will contain more sequences with the 5′ and upstream regions of genes. A randomly primed library is particularly useful if an oligo d(T) library does not yield a full-length cDNA.

[0164] High fidelity amplification was obtained by PCR using methods well known in the art. PCR was performed in 96-well plates using the DNA ENGINE thermal cycler (M J Research). The reaction mix contained DNA template, 200 nmol of each primer, reaction buffer containing Mg²⁺, (NH₄)₂SO₄, and β-mercaptoethanol, Taq DNA polymerase (APB), ELONGASE enzyme (Invitrogen), and Pfu DNA polymerase (Stratagene), with the following parameters for primer pair PCI A and PCI B (Incyte Genomics): Step 1: 94 C., 3 min; Step 2: 94 C., 15 sec; Step 3: 60 C., 1 min; Step 4: 68 C., 2 min; Step 5: Steps 2, 3, and 4 repeated 20 times; Step 6: 68 C., 5 min; Step 7: storage at 4 C. In the alternative, the parameters for primer pair T7 and SK+ (Stratagene) were as follows: Step 1: 94 C., 3 min; Step 2: 94 C., 15 sec; Step 3: 57 C., 1 min; Step 4: 68 C., 2 min; Step 5: Steps 2, 3, and 4 repeated 20 times; Step 6: 68 C., 5 min; Step 7: storage at 4 C.

[0165] The concentration of DNA in each well was determined using 100 μl PICOGREEN reagent as described above (Molecular Probes). A 5 μl to 10 μl aliquot of the reaction mixture was analyzed by electrophoresis on a 1% agarose mini-gel to determine which reactions were successful in extending the sequence.

[0166] The extended nucleic acids were desalted and concentrated, transferred to 384-well plates, digested with CviJI cholera virus endonuclease (Molecular Biology Research, Madison Wis.), and sonicated or sheared prior to religation into pUC18 vector (APB). For shotgun sequencing, the digested nucleic acids were separated on low concentration (0.6 to 0.8%) agarose gels, fragments were excised, and agar digested with AGARACE enzyme (Promega). Extended clones were religated using T4 DNA ligase (New England Biolabs, Beverly Mass.) into pUC18 vector (APB), treated with Pfu DNA polymerase (Stratagene) to fill-in restriction site overhangs, and transformed into competent E. coli cells. Transformed cells were selected on antibiotic-containing media, and individual colonies were picked and cultured overnight at 37 C. in 384-well plates in LB/2x carbenicillin liquid media.

[0167] The cells were lysed, and DNA was amplified by PCR using Taq DNA polymerase (APB) and Pfu DNA polymerase (Stratagene) with the following parameters: Step 1: 94 C., 3 min; Step 2: 94 C., 15 sec; Step 3: 60 C., 1 min; Step 4: 72 C., 2 min; Step 5: steps 2, 3, and 4 repeated 29 times; Step 6: 72 C., 5 min; Step 7: storage at 4 C. DNA was quantified using PICOGREEN reagent (Molecular Probes) as described above. Samples with low DNA recoveries were reamplified using the same conditions described above. Samples were diluted with 20% dimethylsulfoxide (DMSO; 1:2, v/v), and sequenced using DYENAMIC energy transfer sequencing primers and the DYENAMIC DIRECT cycle sequencing kit (APB) or the ABI PRISM BIGDYE terminator cycle sequencing kit (ABI).

[0168] XII Assembly and Analysis of cDNAs

[0169] Component nucleotide sequences from chromatograms were subjected to PHRED analysis (Phil Green, University of Washington, Seattle Wash.) and assigned a quality score. The sequences having at least a required quality score were subject to various pre-processing algorithms to eliminate low quality 3′ ends, vector and linker sequences, polyA tails, Alu repeats, mitochondrial and ribosomal sequences, bacterial contamination sequences, and sequences smaller than 50 base pairs. Sequences were screened using the BLOCK 2 program (Incyte Genomics), a motif analysis program based on sequence information contained in the SWISS-PROT and PROSITE databases (Bairoch et al. (1997) Nucleic Acids Res 25:217-221; Attwood et al. (1997) J Chem Inf Comput Sci 37:417-424).

[0170] Processed sequences were subjected to assembly procedures in which the sequences were assigned to bins, one sequence per bin. Sequences in each bin were assembled to produce consensus sequences, nucleic acid sequences. Subsequent new sequences were added to existing bins using BLAST (Altschul (supra); Altschul et al. (supra); Karlin et al. (1988) Proc Natl Acad Sci 85:841-845), BLASTn (vers.1.4, WashU), and CROSSMATCH software (Phil Green, supra). Candidate pairs were identified as all BLAST hits having a quality score greater than or equal to 150. Alignments of at least 82% local identity were accepted into the bin. The component sequences from each bin were assembled using PHRAP (Phil Green, supra). Bins with several overlapping component sequences were assembled using DEEP PHRAP (Phil Green, supra).

[0171] Bins were compared against each other, and those having local similarity of at least 82% were combined and reassembled. Reassembled bins having nucleic acid sequences of insufficient overlap (less than 95% local identity) were re-split. Assembled nucleic acid sequences were also subjected to analysis by STITCHER/EXON MAPPER algorithms which analyzed the probabilities of the presence of splice variants, alternatively spliced exons, splice junctions, differential expression of alternative spliced genes across tissue types, disease states, and the like. These resulting bins were subjected to several rounds of the above assembly procedures to produce the nucleic acid sequences found in the LIFESEQ GOLD database (Incyte Genomics).

[0172] The assembled nucleic acid sequences were annotated using the following procedure. Nucleic acid sequences were analyzed using BLASTn (vers. 2.0, NCBI) versus GBpri (GenBank vers. 116). “Hits” were defined as an exact match having from 95% local identity over 200 base pairs through 100% local identity over 100 base pairs, or a homolog match having an E-value equal to or greater than 1×10⁻⁸. (The “E-value” quantifies the statistical probability that a match between two sequences occurred by chance). The hits were subjected to frameshift FASTx versus GENPEPT (GenBank version 109). In this analysis, a homolog match was defined as having an E-value of 1×10⁻⁸. The assembly method used above was described in U.S. Ser. No. 09/276,534, filed Mar. 25, 1999, and the LIFESEQ GOLD user manual (Incyte Genomics).

[0173] Following assembly, nucleic acid sequences were subjected to motif, BLAST, Hidden Markov Model (HMM; Pearson and Lipman (1988) Proc Natl Acad Sci 85:2444-2448; Smith and Waterman (1981) J Mol Biol 147:195-197), and functional analyses, and categorized in protein hierarchies using methods described in U.S. Ser. No. 08/812,290, filed Mar. 6, 1997; U.S. Ser. No. 08/947,845, filed Oct. 9, 1997; U.S. Pat. No. 5,953,727; and U.S. Ser. No. 09/034,807, filed Mar. 4, 1998. Nucleic acid sequences may be further queried against public databases such as the GenBank rodent, mammalian, vertebrate, eukaryote, prokaryote, and human EST databases.

[0174] XIII Selection of cDNAs, Microarray Preparation and Use

[0175] Incyte clones represent all or a portion of nucleic acid sequences derived from the LIFESEQ GOLD assembled human sequence database (Incyte Genomics). In cases where more than one clone is available for a particular nucleic acid sequence, the 5′-most clone is used on the microarray. The GENEALBUM GEM series 1-6 microarrays (Incyte Genomics) contain 52,616 array elements which represent 17,472 annotated clusters and 35,144 unannotated clusters. The HUAN GENOME GEM series 1-3 microarrays (Incyte Genomics) contain 28,626 array elements which represent 10,068 annotated clusters and 18,558 unannotated clusters. For the UNIGEM series microarrays (Incyte Genomics), Incyte clones are mapped to non-redundant Unigene clusters (Unigene database (build 46), NCBI; Shuler (1997) J Mol Med 75:694-698), and the 5′ clone with the strongest BLAST alignment (at least 90% identity and 100 bp overlap) is chosen, verified, and used in the construction of the microarray. The UNIGEM V microarray (Incyte Genomics) contains 7075 array elements which represent 4610 annotated genes and 2,184 unannotated clusters.

[0176] To construct microarrays, cDNAs are amplified from transformed bacterial cells using primers complementary to vector sequences flanking the cDNA insert. Thirty cycles of PCR increase the initial quantity of cDNAs from 1-2 ng to a final quantity greater than 5 μg. Amplified cDNAs are then purified using SEPHACRYL-400 columns (APB). Purified cDNAs are immobilized on polymer-coated glass slides. Glass microscope slides (Corning, Corning N.Y.) are cleaned by ultrasound in 0.1% SDS and acetone, with extensive distilled water washes between and after treatments. Glass slides are etched in 4% hydrofluoric acid (VWR Scientific Products, West Chester Pa.), washed thoroughly in distilled water, and coated with 0.05% aminopropyl silane (Sigma Aldrich) in 95% ethanol. Coated slides are cured in a 110 C. oven. cDNAs are applied to the coated glass substrate using a procedure described in U.S. Pat. No. 5,807,522. One microliter of the cDNA at an average concentration of 100 ng/ul is loaded into the open capillary printing element by a high-speed robotic apparatus which then deposits about 5 nl of cDNA per slide.

[0177] Microarrays are UV-crosslinked using a STRATALINKER UV-crosslinker (Stratagene), and then washed at room temperature once in 0.2% SDS and three times in distilled water. Non-specific binding sites are blocked by incubation of microarrays in 0.2% casein in phosphate buffered saline (Tropix, Bedford Mass.) for 30 minutes at 60 C. followed by washes in 0.2% SDS and distilled water as before.

[0178] XIV Preparation of Samples

[0179] Treated tissues or cells are harvested and lysed in 1 ml of TRIZOL reagent (5×10⁶ cells/ml; (Invitrogen). The lysates are vortexed thoroughly and incubated at room temperature for 2-3 minutes and extracted with 0.5 ml chloroform. The extract is mixed, incubated at room temperature for 5 minutes, and centrifuged at 15,000 rpm for 15 minutes at 4° C. The aqueous layer is collected and an equal volume of isopropanol was added. Samples are mixed, incubated at room temperature for 10 minutes, and centrifuged at 15,000 rpm for 20 minutes at 4° C. The supernatant is removed and the RNA pellet is washed with 1 ml of 70% ethanol, centrifuged at 15,000 rpm at 4° C., and resuspended in RNase-free water. The concentration of the RNA is determined by measuring the optical density at 260 nm.

[0180] Poly(A) RNA is prepared using an OLIGOTEX mRNA kit (Qiagen) with the following modifications: OLIGOTEX beads are washed in tubes instead of on spin columns, resuspended in elution buffer, and then loaded onto spin columns to recover mRNA. To obtain maximum yield, the mRNA is eluted twice.

[0181] Each poly(A) RNA sample is reverse transcribed using MMLV reverse-transcriptase, 0.05 pg/μl oligo-d(T) primer (21 mer), 1× first strand buffer, 0.03 units/ul RNase inhibitor, 500 uM dATP, 500 uM dGTP, 500 uM dTTP, 40 uM dCTP, and 40 uM either dCTP-Cy3 or dCTP-Cy5 (APB). The reverse transcription reaction is performed in a 25 ml volume containing 200 ng poly(A) RNA using the GEMBRIGHT kit (Incyte Genomics). Specific control poly(A) RNAs (YCFR06, YCFR45, YCFR67, YCFR85, YCFR43, YCFR22, YCFR23, YCFR25, YCFR44, YCFR26) are synthesized by in vitro transcription from non-coding yeast genomic DNA (W. Lei, unpublished). As quantitative controls, control mRNAs (YCFR06, YCFR45, YCFR67, and YCFR85) at 0.002ng, 0.02ng, 0.2 ng, and 2ng are diluted into reverse transcription reaction at ratios of 1:100,000, 1:10,000, 1:1000, 1:100 (w/w) to sample mRNA, respectively. To sample differential expression patterns, control mRNAs (YCFR43, YCFR22, YCFR23, YCFR25, YCFR44, YCFR26) are diluted into reverse transcription reaction at ratios of 1:3, 3:1, 1:10, 10:1, 1:25, 25:1 (w/w) to sample mRNA. Reactions are incubated at 37 C. for 2 hr, treated with 2.5 ml of 0.5M sodium hydroxide, and incubated for 20 minutes at 85 C. to the stop the reaction and degrade the RNA.

[0182] cDNAs are purified using two successive CHROMA SPIN 30 gel filtration spin columns (Clontech). Cy3- and Cy5-labeled reaction samples are combined as described below and ethanol precipitated using 1 ml of glycogen (1 mg/ml), 60 ml sodium acetate, and 300 ml of 100% ethanol. The cDNAs are then dried to completion using a SpeedVAC system (Savant Instruments, Holbrook N.Y.) and resuspended in 14 μl 5× SSC/0.2% SDS.

[0183] XV Hybridization and Detection

[0184] Hybridization reactions contain 9 μl of sample mixture containing 0.2 μg each of Cy3 and Cy5 labeled cDNA synthesis products in 5× SSC, 0.2% SDS hybridization buffer. The mixture is heated to 65 C. for 5 minutes and is aliquoted onto the microarray surface and covered with an 1.8 cm² coverslip. The microarrays are transferred to a waterproof chamber having a cavity just slightly larger than a microscope slide. The chamber is kept at 100% humidity internally by the addition of 140 μl of 5× SSC in a corner of the chamber. The chamber containing the microarrays is incubated for about 6.5 hours at 60 C. The microarrays are washed for 10 min at 45 C. in low stringency wash buffer (1× SSC, 0.1% SDS), three times for 10 minutes each at 45 C. in high stringency wash buffer (0.1× SSC), and dried.

[0185] Reporter-labeled hybridization complexes are detected with a microscope equipped with an Innova 70 mixed gas 10 W laser (Coherent, Santa Clara Calif.) capable of generating spectral lines at 488 nm for excitation of Cy3 and at 632 nm for excitation of Cy5. The excitation laser light is focused on the microarray using a 20× microscope objective (Nikon, Melville N.Y.). The slide containing the microarray is placed on a computer-controlled X-Y stage on the microscope and raster-scanned past the objective. The 1.8 cm×1.8 cm microarray used in the present example is scanned with a resolution of 20 micrometers.

[0186] In two separate scans, the mixed gas multiline laser excites the two fluorophores sequentially. Emitted light was split, based on wavelength, into two photomultiplier tube detectors (PMT R1477; Hamamatsu Photonics Systems, Bridgewater N.J.) corresponding to the two fluorophores. Appropriate filters positioned between the microarray and the photomultiplier tubes are used to filter the signals. The emission maxima of the fluorophores used are 565 nm for Cy3 and 650 nm for Cy5. Each microarray is typically scanned twice, one scan per fluorophore using the appropriate filters at the laser source, although the apparatus is capable of recording the spectra from both fluorophores simultaneously.

[0187] The sensitivity of the scans is calibrated using the signal intensity generated by a cDNA control species. Samples of the calibrating cDNA are separately labeled with the two fluorophores and identical amounts of each were added to the hybridization mixture. A specific location on the microarray contains a complementary DNA sequence, allowing the intensity of the signal at that location to be correlated with a weight ratio of hybridizing species of 1:100,000.

[0188] The output of the photomultiplier tube is digitized using a 12-bit RTI-835H analog-to-digital (A/D) conversion board (Analog Devices, Norwood, Mass.) installed in an IBM-compatible PC computer. The digitized data are displayed as an image where the signal intensity is mapped using a linear 20-color transformation to a pseudocolor scale ranging from blue (low signal) to red (high signal). The data are also analyzed quantitatively. Where two different fluorophores are ed and measured simultaneously, the data are first corrected for optical crosstalk (due to overlapping emission spectra) between the fluorophores using each fluorophore's emission spectrum.

[0189] A grid is superimposed over the fluorescence signal image such that the signal from each spot is centered in each element of the grid. The fluorescence signal within each element is then integrated to obtain a numerical value corresponding to the average intensity of the signal. The software used for signal analysis is the GEMTOOLS gene expression analysis program (Incyte Genomics). Significance is defined as signal to background ratio exceeding 2× and area hybridization exceeding 40%.

[0190] XVI Data Analysis and Results

[0191] Array elements that exhibit at least 3-fold change in expression at one or more time points, a signal intensity over 250 units, a signal-to-background ratio of at least 2.5, and an element spot size of at least 40% are identified as differentially expressed using the GEMTOOLS program (Incyte Genomics). Differential expression values are converted to log base 2 scale. Two-thirds of the cDNAs that were differentially expressed have been annotated using BLAST analysis and GenBank.

[0192] XVII Other Hybridization Technologies and Analyses

[0193] Other hybridization technologies utilize a variety of substrates. Arranging cDNAs on polymer coated slides was described in Example V; sample cDNA preparation, hybridization, and analysis using polymer coated slides is described in Examples VI and VII, respectively.

[0194] The cDNAs are applied to a membrane by one of the following methods. A mixture of cDNAs is fractionated by gel electrophoresis and transferred to a nylon membrane by capillary transfer. Alternatively, the cDNAs are individually ligated to a vector and inserted into bacterial host cells to form a library. The cDNAs are then arranged on a substrate by one of the following methods. In the first method, bacterial cells containing individual clones are robotically picked and arranged on a nylon membrane. The membrane is placed on LB agar containing selective agent (carbenicillin, kanamycin, ampicillin, or chloramphenicol depending on the vector used) and incubated at 37 C. for 16 hr. The membrane is removed from the agar and consecutively placed colony side up in 10% SDS, denaturing solution (1.5 M NaCl, 0.5 M NaOH ), neutralizing solution (1.5 M NaCl, 1 M Tris, pH 8.0), and twice in 2×SSC for 10 min each. The membrane is then UV irradiated in a STRATALINKER UV-crosslinker (Stratagene).

[0195] In the second method, cDNAs are amplified from bacterial vectors by thirty cycles of PCR using primers complementary to vector sequences flanking the insert. PCR amplification increases a starting concentration of 1-2 ng nucleic acid to a final quantity greater than 5 μg. Amplified nucleic acids from about 400 bp to about 5000 bp in length are purified using SEPHACRYL-400 beads (APB). Purified nucleic acids are arranged on a nylon membrane manually or using a dot/slot blotting manifold and suction device and are immobilized by denaturation, neutralization, and UV irradiation as described above.

[0196] Hybridization probes derived from cDNAs of the Sequence Listing are employed for screening cDNAs, mRNAs, or genomic DNA in membrane-based hybridizations. Probes are prepared by diluting the cDNAs to a concentration of 40-50 ng in 45 μl TE buffer, denaturing by heating to 100 C. for five min and briefly centrifuging. The denatured cDNA is then added to a REDIPRIME tube (APB), gently mixed until blue color is evenly distributed, and briefly centrifuged. Five microliters of [³²P]dCTP is added to the tube, and the contents are incubated at 37 C. for 10 min. The labeling reaction is stopped by adding 5 μl of 0.2M EDTA, and probe is purified from unincorporated nucleotides using a PROBEQUANT G-50 microcolumn (APB). The purified probe is heated to 100 C. for five min and then snap cooled for two min on ice.

[0197] Membranes are pre-hybridized in hybridization solution containing 1% Sarkosyl and 1× high phosphate buffer (0.5 M NaCl, 0.1 M Na₂HPO₄, 5 mM EDTA, pH 7) at 55 C for two hr. The probe, diluted in 15 ml fresh hybridization solution, is then added to the membrane. The membrane is hybridized with the probe at 55 C. for 16 hr. Following hybridization, the membrane is washed for 15 min at 25 C. in 1 mM Tris (pH 8.0), 1% Sarkosyl, and four times for 15 min each at 25 C. in 1 mM Tris (pH 8.0). To detect hybridization complexes, XOMAT-AR film (Eastman Kodak, Rochester N.Y.) is exposed to the membrane overnight at −70 C., developed, and examined.

[0198] XVIII Further Characterization of Differentially Expressed cDNAs and Proteins

[0199] Sequences were blasted against the LIFESEQ Gold 5.1 database (Incyte Genomics) and an Incyte nucleic acid sequence and its sequence variants were chosen for each clone. The nucleic acid sequence and variant sequences were blasted against GenBank database to acquire annotation. The cDNAs were translated into amino acid sequences which were blasted against the Genpept and other protein databases to acquire annotation and characterization, i.e., structural motifs.

[0200] Percent sequence identity can be determined electronically for two or more amino acid or nucleic acid sequences using the MEGALIGN program, a component of LASERGENE software (DNASTAR). The percent identity between two amino acid sequences is calculated by dividing the length of sequence A, minus the number of gap residues in sequence A, minus the number of gap residues in sequence B, into the sum of the residue matches between sequence A and sequence B, times one hundred. Gaps of low or of no homology between the two amino acid sequences are not included in determining percentage identity.

[0201] Sequences with conserved protein motifs may be searched using the BLOCKS search program. This program analyses sequence information contained in the Swiss-Prot and PROSITE databases and is useful for determining the classification of uncharacterized proteins translated from genomic or cDNA sequences (Bairoch et al.(supra); Attwood et al. (supra). PROSITE database is a useful source for identifying functional or structural domains that are not detected using motifs due to extreme sequence divergence. Using weight matrices, these domains are calibrated against the SWISS-PROT database to obtain a measure of the chance distribution of the matches.

[0202] The PRINTS database can be searched using the BLIMPS search program to obtain protein family “fingerprints”. The PRINTS database complements the PROSITE database by exploiting groups of conserved motifs within sequence alignments to build characteristic signatures of different protein families. For both BLOCKS and PRINTS analyses, the cutoff scores for local similarity were: >1300=strong, 1000-1300=suggestive; for global similarity were: p<exp−3; and for strength (degree of correlation) were: >1300=strong, 1000-1300=weak.

[0203] Rat cDNAs were identified by the method as described for human cDNAs using clones from rat cDNA libraries.

[0204] XIX Expression of the Encoded Protein

[0205] Expression and purification of a protein encoded by a cDNA of the invention is achieved using bacterial or virus-based expression systems. For expression in bacteria, cDNA is subcloned into a vector containing an antibiotic resistance gene and an inducible promoter that directs high levels of cDNA transcription. Examples of such promoters include, but are not limited to, the trp-lac (tac) hybrid promoter and the T5 or T7 bacteriophage promoter in conjunction with the lac operator regulatory element. Recombinant vectors are transformed into bacterial hosts, such as BL21(DE3). Antibiotic resistant bacteria express the protein upon induction with IPTG. Expression in eukaryotic cells is achieved by infecting Spodoptera frugiperda (Sf9) insect cells with recombinant baculovirus, Autographica californica nuclear polyhedrosis virus. The polyhedrin gene of baculovirus is replaced with the cDNA by either homologous recombination or bacterial-mediated transposition involving transfer plasmid intermediates. Viral infectivity is maintained and the strong polyhedrin promoter drives high levels of transcription.

[0206] For ease of purification, the protein is synthesized as a fusion protein with glutathione-S-transferase (GST; APB) or a similar alternative such as FLAG. The fusion protein is purified on immobilized glutathione under conditions that maintain protein activity and antigenicity. After purification, the GST moiety is proteolytically cleaved from the protein with thrombin. A fusion protein with FLAG, an 8-amino acid peptide, is purified using commercially available monoclonal and polyclonal anti-FLAG antibodies (Eastman Kodak, Rochester N.Y.).

[0207] XX Production of Specific Antibodies

[0208] A denatured protein from a reverse phase HPLC separation is obtained in quantities up to 75 mg. This denatured protein is used to immunize mice or rabbits following standard protocols. About 100 μg is used to immunize a mouse, while up to 1 mg is used to immunize a rabbit. The denatured protein is radioiodinated and incubated with murine B-cell hybridomas to screen for monoclonal antibodies. About 20 mg of protein is sufficient for labeling and screening several thousand clones.

[0209] In another approach, the amino acid sequence translated from a cDNA of the invention is analyzed using PROTEAN software (DNASTAR) to determine regions of high antigenicity, essentially antigenically-effective epitopes of the protein. The optimal sequences for immunization are usually at the C-terminus, the N-terminus, and those intervening, hydrophilic regions of the protein that are likely to be exposed to the external environment when the protein is in its natural conformation. Typically, oligopeptides about 15 residues in length are synthesized using an ABI 431 peptide synthesizer (ABI) using Fmoc-chemistry and then coupled to keyhole limpet hemocyanin (KLH; Sigma Aldrich) by reaction with M-maleimidobenzoyl-N-hydroxysuccinimide ester. If necessary, a cysteine may be introduced at the N-terminus of the peptide to permit coupling to KLH. Rabbits are immunized with the oligopeptide-KLH complex in complete Freund's adjuvant. The resulting antisera are tested for antipeptide activity by binding the peptide to plastic, blocking with 1% BSA, reacting with rabbit antisera, washing, and reacting with radioiodinated goat anti-rabbit IgG.

[0210] Hybridomas are prepared and screened using standard techniques. Hybridomas of interest are detected by screening with radioiodinated protein to identify those fusions producing a monoclonal antibody specific for the protein. In a typical protocol, wells of 96 well plates (FAST, Becton-Dickinson, Palo Alto Calif.) are coated with affinity-purified, specific rabbit-anti-mouse (or suitable anti-species Ig) antibodies at 10 mg/ml. The coated wells are blocked with 1% BSA and washed and exposed to supernatants from hybridomas. After incubation, the wells are exposed to radiolabeled protein at 1 mg/ml. Clones producing antibodies bind a quantity of labeled protein that is detectable above background.

[0211] Such clones are expanded and subjected to 2 cycles of cloning at 1 cell/3 wells. Cloned hybridomas are injected into pristane-treated mice to produce ascites, and monoclonal antibody is purified from the ascitic fluid by affinity chromatography on protein A (APB). Monoclonal antibodies with affinities of at least 10⁸ M⁻¹, preferably 10⁹ to 10¹⁰ M⁻¹ or stronger, are made by procedures well known in the art.

[0212] XXI Purification of Naturally Occurring Protein Using Specific Antibodies

[0213] Naturally occurring or recombinant protein is substantially purified by immunoaffinity chromatography using antibodies specific for the protein. An immunoaffinity column is constructed by covalently coupling the antibody to CNBr-activated SEPHAROSE resin (APB). Media containing the protein is passed over the immunoaffinity column, and the column is washed using high ionic strength buffers in the presence of detergent to allow preferential absorbance of the protein. After coupling, the protein is eluted from the column using a buffer of pH 2-3 or a high concentration of urea or thiocyanate ion to disrupt antibody/protein binding, and the protein is collected.

[0214] XXII Screening Molecules for Specific Binding with the cDNA or Protein

[0215] The cDNA or fragments thereof and the protein or portions thereof are labeled with ³²P-dCTP, Cy3-dCTP, Cy5-dCTP (APB), or BIODIPY or FITC (Molecular Probes), respectively. Candidate molecules or compounds previously arranged on a substrate are incubated in the presence of labeled nucleic or amino acid. After incubation under conditions for either a cDNA or a protein, the substrate is washed, and any position on the substrate retaining label, which indicates specific binding or complex formation, is assayed. The binding molecule is identified by its arrayed position on the substrate. Data obtained using different concentrations of the nucleic acid or protein are used to calculate affinity between the labeled nucleic acid or protein and the bound molecule. High throughput screening using very small assay volumes and very small amounts of test compound is fully described in Burbaum et al. U.S. Pat. No. 5,876,946.

[0216] All patents and publications mentioned in the specification are incorporated herein by reference. Various modifications and variations of the described method and system of the invention will be apparent to those skilled in the art without departing from the scope and spirit of the invention. Although the invention has been described in connection with specific preferred embodiments, it should be understood that the invention as claimed should not be unduly limited to such specific embodiments. Indeed, various modifications of the described modes for carrying out the invention that are obvious to those skilled in the field of molecular biology or related fields are intended to be within the scope of the following claims.

TABLE 1

| SEQ | | | | | |
|---|---|---|---|---|---|
| ID | | Maximum | | | Representative |
| NO | Clone ID | Abundance | Strain | Sex | Treatment |
| 1 | 700066666 | 6 | HW | | APAP |
| 2 | 700138330 | 4 | HW | | APAP |
| 3 | 700138340 | 3 | HW | | APAP |
| 4 | 700230507 | 3 | HW | | APAP |
| 5 | 700275105 | 3 | HW | | APAP |
| 6 | 700062791 | 4 | HW | | BP |
| 7 | 700250279 | 6 | HW | | BP |
| 8 | 700312413 | 4 | HW | | BP |
| 9 | 700308908 | 6 | HW | | BP, CLO |
| 10 | 700139239 | 4 | HW | M | CLO |
| 11 | 700131403 | 4 | HW | | CLO |
| | | | | | ANIT, 4-AAF, |
| 12 | 700062506 | 3 | HW | F | Hydra |
| | | | | | Feno, 4-AAF, |
| 13 | 700135749 | 4 | HW | F | Hydra |
| 14 | 700330824 | 3 | HW | F | ANIT, CCI4, 4-AAF |
| 15 | 700024728 | 3 | HW | | ANIT, 4-AAF |
| 16 | 700024834 | 3 | HW | | ANIT, CCI4, 4-AAF |
| 17 | 700059927 | 4 | HW | | ANIT, Hydra |
| 18 | 700060675 | 4 | HW | | ANIT, CCI4 |
| 19 | 700062240 | 5 | HW | | ANIT, CCI4, 4-AAF |
| 20 | 700063569 | 3 | HW | | Feno, ANIT |
| 21 | 700064131 | 3 | HW | | ANIT, 4-AAF |
| 22 | 700065081 | 3 | HW | | 4-AAF |
| 23 | 700067778 | 3 | HW | | ANIT, CCI4, Hydra |
| 24 | 700123633 | 3 | HW | | ANIT, CCI4, Hydra |
| 25 | 700127949 | 3 | HW | | CCI4, 4-AAF |
| 26 | 700132557 | 7 | HW | | CCI4, 4-AAF |
| 27 | 700135733 | 4 | HW | | CCI4, 4-AAF |
| | | | | | CCI4, 4-AAF, |
| 28 | 700135850 | 3 | HW | | Hydra |
| 29 | 700137416 | 4 | HW | | ANIT, CCI4, |
| 30 | 700140375 | 3 | HW | | Feno, CCI4, 4-AAF |
| | | | | | Feno, ANIT, CCI4, |
| 31 | 700140450 | 8 | HW | | 4-AAF |
| 32 | 700144406 | 4 | HW | | ANIT, CCI4, Hydra |
| 33 | 700175249 | 7 | HW | | ANIT, CCI4, Hydra |
| 34 | 700177158 | 3 | HW | | ANIT, CCI4, 4-AAF |
| 35 | 700179766 | 3 | HW | | Feno, ANIT |
| 36 | 700181614 | 3 | HW | | ANIT, CCI4 |
| 37 | 700182016 | 3 | HW | | Feno, CCI4, 4-AAF |
| | | | | | Feno, ANIT, CCI4, |
| 38 | 700185871 | 3 | HW | | 4-AAF |
| 39 | 700198357 | 3 | HW | | Feno, ANIT, CCI4 |
| 40 | 700230123 | 4 | HW | | Feno, ANIT, CCI4 |
| 41 | 700248367 | 3 | HW | | ANIT, CCI4, 4-AAF |
| 42 | 700250877 | 3 | HW | | Feno, CCI4 |
| 43 | 700253694 | 3 | HW | | CCI4, 4-AAF |
| 44 | 700303850 | 3 | HW | | CCI4, 4-AAF |
| | | | | | Feno, ANIT, CCI4, |
| 45 | 700305380 | 4 | HW | | 4-AAF |
| 46 | 700313077 | 3 | HW | | CCI4 |
| 47 | 700361225 | 3 | HW | | CCI4 |
| 48 | 700363174 | 3 | HW | | ANIT, CCI4, 4-AAF |
| 49 | 700478138 | 5 | HW | | Feno, ANIT, CCI4 |
| 50 | 700480077 | 3 | HW | | ANIT, CCI4, 4-AAF |
| 51 | 700483222 | 3 | HW | | ANIT, 4-AAF |
| 52 | 700491990 | 3 | HW | | CCI4 |
| | | | | | Feno, ANIT, CCI4, |
| 53 | 700818852 | 5 | HW | | 4-AAF |
| | | | | | Feno, ANIT, CCI4, |
| 54 | 700937735 | 8 | HW | | 4-AAF |
| 55 | 701197728 | 3 | HW | | Feno, ANIT |
| 56 | 701257766 | 3 | HW | | ANIT, CCI4 |
| 57 | 701341861 | 3 | HW | | ANIT, 4-AAF |
| 58 | 701574951 | 3 | HW | | CCI4, 4-AAF |
| 59 | 701578278 | 3 | HW | | CCI4 |
| 60 | 701597659 | 3 | HW | | Feno, ANIT, CCI4 |
| | | | | | ANIT, CCI4, |
| 61 | 701637512 | 4 | HW | | 4-AAF, Hydra |
| 62 | 700139271 | 8 | SD | M | APAP |
| 63 | 700141770 | 3 | SD | M | APAP |
| 64 | 700142213 | 4 | SD | M | APAP |
| 65 | 700128536 | 3 | SD | | APAP |
| 66 | 700187893 | 3 | SD | | APAP |
| 67 | 700285351 | 3 | SD | | APAP |
| 68 | 700480580 | 3 | SD | | APAP |
| 69 | 701255247 | 4 | SD | | APAP |
| 70 | 701471433 | 3 | SD | | APAP |
| 71 | 701478494 | 3 | SD | | APAP |
| 72 | 701483549 | 4 | SD | | APAP |
| 73 | 701942330 | 3 | SD | | APAP |
| 74 | 700137978 | 7 | SD | F | BP |
| 75 | 701709967 | 4 | SD | F | BP |
| 76 | 700059750 | 3 | SD | | BP |
| 77 | 700123903 | 3 | SD | | BP |
| 78 | 700135554 | 3 | SD | | BP |
| 79 | 700175783 | 4 | SD | | BP |
| 80 | 700176825 | 4 | SD | | BP |
| 81 | 700177142 | 4 | SD | | BP |
| 82 | 700185570 | 3 | SD | | BP |
| 83 | 700244879 | 3 | SD | | BP |
| 84 | 700246085 | 4 | SD | | BP |
| 85 | 700302152 | 10 | SD | | BP |
| 86 | 700305538 | 13 | SD | | BP |
| 87 | 700307329 | 3 | SD | | BP |
| 88 | 700323326 | 4 | SD | | BP |
| 89 | 700328990 | 4 | SD | | BP |
| 90 | 700330391 | 3 | SD | | BP |
| 91 | 700363445 | 6 | SD | | BP |
| 92 | 700480903 | 3 | SD | | BP |
| 93 | 700482908 | 3 | SD | | BP |
| 94 | 700935261 | 3 | SD | | BP |
| 95 | 700939101 | 3 | SD | | BP |
| 96 | 700950626 | 3 | SD | | BP |
| 97 | 701316308 | 3 | SD | | BP |
| 98 | 701316810 | 3 | SD | | BP |
| 99 | 701327688 | 3 | SD | | BP |
| 100 | 701337820 | 3 | SD | | BP |
| 101 | 701432276 | 4 | SD | | BP |
| 102 | 701432317 | 3 | SD | | BP |
| 103 | 701472012 | 3 | SD | | BP |
| 104 | 701472036 | 3 | SD | | BP |
| 105 | 701517108 | 3 | SD | | BP |
| 106 | 701710808 | 4 | SD | | BP |
| 107 | 701241446 | 3 | SD | | BP, APAP |
| 108 | 701711993 | 5 | SD | | BP, APAP |
| 109 | 700250903 | 11 | SD | M | BP, CLO |
| 110 | 700192259 | 5 | SD | | BP, CLO |
| 111 | 700269330 | 4 | SD | | BP, CLO |
| 112 | 701317696 | 5 | SD | | BP, CLO |
| 113 | 700230724 | 4 | SD | F | CLO |
| 114 | 700307025 | 4 | SD | F | CLO |
| 115 | 700361295 | 3 | SD | F | CLO |
| 116 | 700420930 | 3 | SD | F | CLO |
| 117 | 700526706 | 3 | SD | F | CLO |
| 118 | 700635732 | 3 | SD | F | CLO |
| 119 | 700824178 | 3 | SD | F | CLO |
| 120 | 701396706 | 4 | SD | F | CLO |
| 121 | 701475987 | 3 | SD | F | CLO |
| 122 | 701621131 | 3 | SD | F | CLO |
| 123 | 701879551 | 3 | SD | F | CLO |
| 124 | 701883446 | 3 | SD | F | CLO |
| 125 | 701883859 | 3 | SD | F | CLO |
| 126 | 700122019 | 4 | SD | M | CLO |
| 127 | 700276321 | 4 | SD | M | CLO |
| 128 | 700323126 | 3 | SD | M | CLO |
| 129 | 700324604 | 3 | SD | M | CLO |
| 130 | 700363120 | 3 | SD | M | CLO |
| 131 | 700364810 | 3 | SD | M | CLO |
| 132 | 700510701 | 4 | SD | M | CLO |
| 133 | 700810877 | 5 | SD | M | CLO |
| 134 | 700928985 | 6 | SD | M | CLO |
| 135 | 700931410 | 4 | SD | M | CLO |
| 136 | 701093657 | 4 | SD | M | CLO |
| 137 | 701259518 | 3 | SD | M | CLO |
| 138 | 701264516 | 4 | SD | M | CLO |
| 139 | 701341715 | 4 | SD | M | CLO |
| 140 | 701434939 | 4 | SD | M | CLO |
| 141 | 701460429 | 3 | SD | M | CLO |
| 142 | 701463285 | 4 | SD | M | CLO |
| 143 | 701605992 | 4 | SD | M | CLO |
| 144 | 701737185 | 3 | SD | M | CLO |
| 145 | 701737221 | 4 | SD | M | CLO |
| 146 | 701920170 | 3 | SD | M | CLO |
| 147 | 701922204 | 3 | SD | M | CLO |
| 148 | 701922375 | 4 | SD | M | CLO |
| 149 | 701922439 | 4 | SD | M | CLO |
| 150 | 701922513 | 4 | SD | M | CLO |
| 151 | 701922576 | 4 | SD | M | CLO |
| 152 | 701922583 | 3 | SD | M | CLO |
| 153 | 701922711 | 3 | SD | M | CLO |
| 154 | 701922744 | 4 | SD | M | CLO |
| 155 | 701922971 | 3 | SD | M | CLO |
| 156 | 701923019 | 5 | SD | M | CLO |
| 157 | 701923022 | 3 | SD | M | CLO |
| 158 | 701923218 | 4 | SD | M | CLO |
| 159 | 701923240 | 4 | SD | M | CLO |
| 160 | 701923241 | 3 | SD | M | CLO |
| 161 | 701923330 | 3 | SD | M | CLO |
| 162 | 701925484 | 4 | SD | M | CLO |
| 163 | 700025278 | 4 | SD | | CLO |
| 164 | 700122008 | 6 | SD | | CLO |
| 165 | 700136662 | 3 | SD | | CLO |
| 166 | 700144043 | 4 | SD | | CLO |
| 167 | 700177423 | 3 | SD | | CLO |
| 168 | 700247621 | 4 | SD | | CLO |
| 169 | 700251379 | 3 | SD | | CLO |
| 170 | 700272988 | 5 | SD | | CLO |
| 171 | 700306859 | 3 | SD | | CLO |
| 172 | 700307013 | 3 | SD | | CLO |
| 173 | 700323707 | 4 | SD | | CLO |
| 174 | 700513589 | 4 | SD | | CLO |
| 175 | 700538641 | 3 | SD | | CLO |
| 176 | 700592657 | 3 | SD | | CLO |
| 177 | 701190918 | 3 | SD | | CLO |
| 178 | 701313456 | 3 | SD | | CLO |
| 179 | 701397319 | 3 | SD | | CLO |
| 180 | 701429135 | 6 | SD | | CLO |
| 181 | 701429654 | 3 | SD | | CLO |
| 182 | 701458841 | 3 | SD | | CLO |
| 183 | 701470083 | 3 | SD | | CLO |
| 184 | 701562608 | 3 | SD | | CLO |
| 185 | 701884534 | 5 | SD | | CLO |
| 186 | 700068662 | 6 | SD | | CLO, BP |
| 187 | 700933309 | 5 | SD | | CLO, BP |
| 188 | 700024288 | 2 | SD | F | CLO, BP |
| 189 | 700064545 | 3 | SD | F | CLO |
| 190 | 700066933 | 2 | SD | F | CLO, BP |
| 191 | 700146747 | 3 | SD | F | CLO, BP |
| 192 | 700589657 | 3 | SD | F | CLO |
| 193 | 700858043 | 1 | SD | F | CLO, BP, APAP |
| 194 | 700060595 | 3 | SD | M | CLO |
| 195 | 700061212 | 3 | SD | M | CLO |
| 196 | 700062747 | 2 | SD | M | CLO, BP, APAP |
| 197 | 700124248 | 3 | SD | M | CLO, BP |
| 198 | 700252787 | 3 | SD | M | CLO |
| 199 | 700272719 | 3 | SD | M | CLO |
| 200 | 700282789 | 3 | SD | M | CLO, BP, APAP |
| 201 | 700062503 | 3 | SD | | CLO, BP |
| 202 | 700490891 | 4 | SD | | BP, APAP |

[0217] TABLE 2

| | | | | Human | | |
|---|---|---|---|---|---|---|
| | | | | Template | | |
| | Rat Template | Human Template | Human Template | BLAST Hit | | |
| SEQ ID NO | SEQ ID NO | Number | SEQ ID NO | (Genbank ID) | Hit Description | E value |
| 1 | 210 | 232589.78 | 409 | g4929559 | CGI-45 protein | 1e−24 |
| 2 | 219 | | | | | |
| 3 | 261 | | | | | |
| 4 | 296 | 197046.4 | 467 | g6841323 | Human HSPC337 mRNA, partial cds. | 0 |
| 5 | 252 | 234758.1 | 431 | g6457341 | Human E2IG4 (E2IG4) mRNA, | 0 |
| | | | | | complete cds. | |
| 6 | 231 | 1327511.1 | 416 | g7294014 | CG7725 gene product | 4e−29 |
| 7 | 205 | 1383009.65 | 402 | g6979641 | Human alpha gene sequence. | 0 |
| 8 | 204 | 348148.41 | 401 | g32451 | Human pHS1-2 mRNA with ORF | 0 |
| | | | | | homologous to membrane receptor | |
| | | | | | proteins. | |
| 9 | 264 | | | | | |
| 10 | 246 | | | | | |
| 11 | 280 | 1035717.1 | 456 | g6807782 | Human mRNA; cDNA DKFZp434P086 | 0 |
| | | | | | (from clone DKFZp434P086); | |
| | | | | | partial cds. | |
| 12 | 232 | 380601.63 | 418 | g183891 | Human high density lipoprotein | 0 |
| | | | | | binding protein (HBP) mRNA, | |
| | | | | | complete cds. | |
| 13 | 248 | 1099747.1 | 428 | g5817098 | Human mRNA; cDNA DKFZp566D211 | 8e−62 |
| | | | | | (from clone DKFZp566D211). | |
| 14 | 222 | 978146.2 | 412 | g2865252 | unknown | 6e−15 |
| 15 | 297 | 1311223.1 | 468 | g5138919 | Human PTD014 mRNA, complete cds. | 0 |
| 16 | 263 | 1001899.1 | 441 | | Incyte Unique | |
| 17 | 268 | 1247195.1 | 446 | g6690235 | Human clone HQ0569. | 0 |
| 18 | 284 | | | | | |
| 19 | 287 | 232376.7 | 459 | g7023163 | unnamed protein product | 2e−63 |
| 20 | 227 | | | | | |
| 21 | 377 | | | | | |
| 22 | 383 | 411426.42 | 513 | g338046 | Human SF2p33 mRNA, complete cds. | 0 |
| 23 | 247 | 234677.1 | 427 | g5052586 | BcDNA.GH08385 | 4e−22 |
| 24 | 361 | 236253.20 | 503 | g6808164 | Human mRNA; cDNA DKFZp761A052 | 0 |
| | | | | | (from clone DKFZp761A052). | |
| 25 | 249 | | | | | |
| 26 | 399 | | | | | |
| 27 | 226 | 234482.3 | 414 | g6807766 | Human mRNA; cDNA DKFZp434E146 | 0 |
| | | | | | (from clone DKFZp434E146). | |
| 28 | 336 | 337394.18 | 497 | g7023484 | Human cDNA FLJ11059 fis, clone | 0 |
| | | | | | PLACE1004740. | |
| 29 | 223 | 347045.1 | 413 | g7020630 | Human cDNA FLJ20493 fis, clone | 0 |
| | | | | | KAT08512. | |
| 30 | 238 | | | | | |
| 31 | 324 | 978075.1 | 489 | g7300427 | CG7709 gene product | 1e−05 |
| 32 | 207 | 366288.5 | 406 | g7688684 | Human AD-015 protein mRNA, | 0 |
| | | | | | complete cds. | |
| 33 | 304 | 018653.18 | 474 | | Incyte Unique | |
| 34 | 367 | 235106.13 | 506 | g7020192 | Human cDNA FLJ20234 fis, clone | 0 |
| | | | | | COLF5673. | |
| 35 | 303 | 038495.8 | 473 | g7023545 | Human cDNA FLJ11095 fis, clone | 0 |
| | | | | | PLACE1005374. | |
| 36 | 300 | 474711.6 | 471 | g7959200 | Human mRNA for KIAA1470 protein, | 0 |
| | | | | | partial cds. | |
| 37 | 239 | 071944.2 | 422 | g7106795 | Human HSPC203 mRNA, complete | 0 |
| | | | | | cds. | |
| 38 | 269 | 474736.11 | 447 | g6457337 | Human E2IG1 (E2IG1) mRNA, | 0 |
| | | | | | complete cds. | |
| 39 | 256 | 480324.16 | 436 | g7208833 | hypothetical protein | 0 |
| 40 | 313 | 246290.8 | 481 | g7022551 | unnamed protein product | 7e−38 |
| 41 | 250 | 216242.2 | 429 | g5565686 | Human topoisomerase-related | 0 |
| | | | | | function protein (TRF4-1) mRNA, | |
| | | | | | partial cds. | |
| 42 | 234 | 238854.22 | 420 | g190258 | Human neuron-specific protein | 0 |
| | | | | | gene, last exon, clone D4S234. | |
| 43 | 290 | 1166953.1 | 464 | g7959742 | Human PRO1068 mRNA, complete | 0 |
| | | | | | cds. | |
| 44 | 320 | | | | | |
| 45 | 360 | 333057.2 | 502 | g179717 | Human complement protein C8 | 0 |
| | | | | | alpha subunit mRNA, complete | |
| | | | | | cds. | |
| 46 | 330 | 200068.22 | 494 | g5114044 | Human N-terminal | 0 |
| | | | | | acetyltransferase complex ard1 | |
| | | | | | subunit mRNA, complete cds. | |
| 47 | 278 | 020434.12 | 454 | g7023192 | Human cDNA FLJ10879 fis, clone | 0 |
| | | | | | NT2RP4001896, weakly similar to | |
| | | | | | VEGETATIBLE INCOMPATIBILITY | |
| | | | | | PROTEIN HET-E-1. | |
| 48 | 288 | 1383610.2 | 460 | g3877100 | predicted using | 3e−44 |
| | | | | | Genefinder˜Similarity to Yeast | |
| | | | | | mitochondrial ribosomal protein | |
| | | | | | S5 (SW: RT05_YEAST) | |
| 49 | 381 | | | | | |
| 50 | 283 | | | | | |
| 51 | 334 | 334177.1 | 496 | g7294197 | CG13076 gene product | 3e−88 |
| 52 | 309 | | | | | |
| 53 | 261 | | | | | |
| 54 | 331 | | | | | |
| 55 | 305 | 097341.1 | 475 | g3873789 | predicted using Genefinder | 1e−23 |
| 56 | 257 | 041856.14 | 437 | g7296234 | CG3645 gene product | 0 |
| 57 | 376 | | | | | |
| 58 | 355 | | | | | |
| 59 | 274 | 481118.12 | 451 | g6434473 | predicted using Genefinder; | 2e−10 |
| | | | | | preliminary prediction | |
| 60 | 353 | | | | | |
| 61 | 285 | | | | | |
| 62 | 372 | | | | | |
| 63 | 322 | 1397900.1 | 487 | g5821151 | RNA binding protein | 0.001 |
| 64 | 331 | | | | | |
| 65 | 363 | 246362.2 | 504 | g6841259 | Human HSPC305 mRNA, partial cds. | 0 |
| 66 | 262 | | | | | |
| 67 | 362 | | | | | |
| 68 | 251 | 174274.1 | 430 | | Public Unique | |
| 69 | 293 | | | | | |
| 70 | 225 | | | | | |
| 71 | 224 | | | | | |
| 72 | 208 | 1245800.1 | 407 | g180947 | Human carboxylesterase mRNA, | 0 |
| | | | | | complete cds. | |
| 73 | 335 | | | | | |
| 74 | 344 | | | | | |
| 75 | 352 | | | | | |
| 76 | 221 | | | | | |
| 77 | 323 | 903849.1 | 488 | g7020507 | Human cDNA FLJ20420 fis, clone | 0 |
| | | | | | KAT02462. | |
| 78 | 243 | 991612.1 | 425 | g6969165 | dJ475N16.3 (novel protein | 0 |
| | | | | | similar to RPL7A (60S ribosomal | |
| | | | | | protein L7A)) | |
| 79 | 282 | 1002701.1 | 458 | g7020763 | Human cDNA FLJ20568 fis, clone | 1e−58 |
| | | | | | REC00775. | |
| 80 | 255 | 1042482.1 | 435 | g189786 | erythrocyte p55 | 5e−79 |
| 81 | 326 | 348080.7 | 491 | g5360100 | Human NY-REN-25 antigen mRNA, | 0 |
| | | | | | partial cds. | |
| 82 | 253 | 407217.1 | 432 | | Incyte Unique | |
| 83 | 382 | 1019222.1 | 512 | g3342730 | R31341_1 | 4e−21 |
| 84 | 299 | 335705.2 | 470 | g1136435 | Human mRNA for KIAA0188 gene, | 0 |
| | | | | | partial cds. | |
| 85 | 384 | | | | | |
| 86 | 384 | | | | | |
| 87 | 270 | 1098449.1 | 448 | g6457339 | Human E2IG3 (E2IG3) mRNA, | 4e−34 |
| | | | | | complete cds. | |
| 88 | 369 | | | | | |
| 89 | 215 | | | | | |
| 90 | 266 | 230889.9 | 443 | g5817126 | Human mRNA; cDNA DKFZp586P1622 | 0 |
| | | | | | (from clone DKFZp586P1622). | |
| 91 | 318 | 985408.10 | 484 | g7296240 | CG11490 gene product | 5e−81 |
| 92 | 307 | 203528.1 | 477 | | Incyte Unique | |
| 93 | 271 | | | | | |
| 94 | 378 | 406695.4 | 509 | g6634013 | KIAA0310 protein | 2e−52 |
| 95 | 245 | | | | | |
| 96 | 292 | | | | | |
| 97 | 356 | | | | | |
| 98 | 302 | | | | | |
| 99 | 298 | 205241.6 | 469 | g2772914 | precollagen D | 5e−31 |
| 100 | 240 | 332413.6 | 423 | g6453539 | Human mRNA; cDNA DKFZp434D0428 | 0 |
| | | | | | (from clone DKFZp434D0428); | |
| | | | | | partial cds. | |
| 101 | 217 | | | | | |
| 102 | 348 | | | | | |
| 103 | 213 | | | | | |
| 104 | 354 | 206504.1 | 501 | | Incyte Unique | |
| 105 | 214 | | | | | |
| 106 | 350 | | | | | |
| 107 | 337 | | | | | |
| 108 | 351 | | | | | |
| 109 | 209 | 196677.1 | 408 | g7022989 | Human cDNA FLJ10761 fis, clone | 0 |
| | | | | | NT2RP3004669, weakly similar to | |
| | | | | | ETHANOLAMINE KINASE (EC | |
| | | | | | 2.7.1.82). | |
| 110 | 275 | | | | | |
| 111 | 277 | 1135179.1 | 453 | g6002488 | hypothetical protein | 2e−26 |
| 112 | 368 | | | | | |
| 113 | 242 | | | | | |
| 114 | 316 | | | | | |
| 115 | 317 | 216452.26 | 483 | g7300920 | CG17141 gene product | 1e−65 |
| 116 | 375 | | | | | |
| 117 | 228 | 027980.2 | 415 | g7243746 | Human sir2-related protein type | 0 |
| | | | | | 7 (SIRT7) mRNA, complete cds. | |
| 118 | 321 | 238273.6 | 486 | g6434875 | Human CDK4-binding protein | 0 |
| | | | | | p34SEI1 (SEI1) mRNA, complete | |
| | | | | | cds. | |
| 119 | 244 | 331609.14 | 426 | g7301549 | CG5880 gene product | 1e−70 |
| 120 | 235 | | | | | |
| 121 | 218 | | | | | |
| 122 | 349 | | | | | |
| 123 | 357 | | | | | |
| 124 | 397 | | | | | |
| 125 | 345 | 326679.1 | 499 | | Incyte Unique | |
| 126 | 312 | 331451.18 | 480 | g5262615 | hypothetical protein | 2e−22 |
| 127 | 366 | | | | | |
| 128 | 281 | 1346179.1 | 457 | | Incyte Unique | |
| 129 | 380 | 246935.4 | 511 | g2292986 | cyclic nucleotide-gated channel | 2e−08 |
| | | | | | beta subunit | |
| 130 | 315 | 174240.1 | 482 | g6453490 | Human mRNA; cDNA DKFZp434A2417 | 1e−27 |
| | | | | | (from clone DKFZp434A2417); | |
| | | | | | partial cds. | |
| 131 | 265 | 198345.3 | 442 | g4973018 | Human APMCF1 (APMCF1) mRNA, | 0 |
| | | | | | complete cds. | |
| 132 | 316 | | | | | |
| 133 | 260 | | | | | |
| 134 | 289 | 410014.15 | 462 | g2605967 | 24 | 2e−13 |
| 135 | 333 | 199581.5 | 495 | g5441951 | Human peroxisomal membrane | 0 |
| | | | | | protein PMP 24 mRNA, complete | |
| | | | | | cds. | |
| 136 | 365 | | | | | |
| 137 | 258 | 252542.6 | 438 | g178120 | Human class II alcohol | 0 |
| | | | | | dehydrogenase (ADH4) pi subunit | |
| | | | | | mRNA, complete cds. | |
| 138 | 286 | | | | | |
| 139 | 343 | | | | | |
| 140 | 212 | | | | | |
| 141 | 329 | 992317.12 | 493 | g6690017 | NTR | 8e−12 |
| 142 | 342 | | | | | |
| 143 | 306 | 242821.5 | 476 | g7021948 | Human cDNA FLJ10099 fis, clone | 0 |
| | | | | | HEMBA1002462. | |
| 144 | 392 | | | | | |
| 145 | 385 | | | | | |
| 146 | 338 | | | | | |
| 147 | 339 | | | | | |
| 148 | 386 | | | | | |
| 149 | 387 | | | | | |
| 150 | 393 | | | | | |
| 151 | 394 | | | | | |
| 152 | 396 | | | | | |
| 153 | 390 | | | | | |
| 154 | 391 | | | | | |
| 155 | 371 | | | | | |
| 156 | 389 | | | | | |
| 157 | 388 | | | | | |
| 158 | 276 | 149914.32 | 452 | g7022963 | Human cDNA FLJ10744 fis, clone | 0 |
| | | | | | NT2RP3001646, weakly similar to | |
| | | | | | WD-40 REPEAT PROTEIN MSI2. | |
| 159 | 340 | 1099669.1 | 498 | g7018544 | Human mRNA; cDNA DKFZp434F1312 | 0 |
| | | | | | (from clone DKFZp434F1312); | |
| | | | | | partial cds. | |
| 160 | 395 | | | | | |
| 161 | 398 | | | | | |
| 162 | 341 | | | | | |
| 163 | 301 | 903554.2 | 472 | g6164677 | Human | 0 |
| | | | | | methylmalonate-semialdehyde | |
| | | | | | dehydrogenase (MMSDH) mRNA, | |
| | | | | | complete cds. | |
| 164 | 308 | | | | | |
| 165 | 294 | 244999.5 | 465 | | Incyte Unique | |
| 166 | 311 | 475017.1 | 479 | g7291808 | CG11414 gene product | 2e−20 |
| 167 | 237 | | | | | |
| 168 | 310 | 229079.16 | 478 | g3242705 | unknown protein | 0 |
| 169 | 328 | | | | | |
| 170 | 359 | | | | | |
| 171 | 314 | | | | | |
| 172 | 325 | 1340709.1 | 490 | g5912188 | Human mRNA; cDNA DKFZp564B1264 | 6e−11 |
| | | | | | (from clone DKFZp564B1264). | |
| 173 | 279 | 232928.5 | 455 | g7023105 | Human cDNA FLJ10828 fis, clone | 0 |
| | | | | | NT2RP4001122, weakly similar to | |
| | | | | | TIPD PROTEIN. | |
| 174 | 327 | 1382922.15 | 492 | g337515 | Human ribosomal protein S6 mRNA, | 0 |
| | | | | | complete cds. | |
| 175 | 254 | 246916.11 | 433 | g7106865 | Human HSPC238 mRNA, complete | 0 |
| | | | | | cds. | |
| 176 | 203 | 235885.5 | 400 | g3298561 | Human zinc-finger helicase | 0 |
| | | | | | (hZFH) mRNA, complete cds. | |
| 177 | 273 | 228579.1 | 450 | | Incyte Unique | |
| 178 | 370 | | | | | |
| 179 | 230 | | | | | |
| 180 | 358 | | | | | |
| 181 | 206 | 369213.39 | 405 | g35824 | Human mRNA for pregnancy zone | 0 |
| | | | | | protein. | |
| 182 | 332 | | | | | |
| 183 | 229 | | | | | |
| 184 | 347 | 474680.27 | 500 | g3947689 | Human mRNA for sec24 protein | 0 |
| | | | | | (Sec24B isoform). | |
| 185 | 291 | | | | | |
| 186 | 211 | | | | | |
| 187 | 322 | 1397900.1 | 487 | g5821151 | RNA binding protein | 0.001 |
| 188 | 216 | 308057.1 | 410 | | Public Unique | |
| 189 | 236 | 967709.1 | 421 | g7303346 | CG17059 gene product | 1e−08 |
| 190 | 220 | 1137592.1 | 411 | | Incyte Unique | |
| 191 | 319 | 413491.14 | 485 | g7023393 | Human cDNA FLJ11000 fis, clone | 0 |
| | | | | | PLACE1002794. | |
| 192 | 295 | 239501.1 | 466 | g7021134 | Human cDNA FLJ20815 fis, clone | 0 |
| | | | | | ADSE01038, highly similar to | |
| | | | | | AJ007398 Human mRNA for PBK1 | |
| | | | | | protein. | |
| 193 | 259 | 233720.7 | 439 | g7022206 | Human cDNA FLJ10276 fis, clone | 0 |
| | | | | | HEMBB1001182. | |
| 194 | 346 | | | | | |
| 195 | 379 | 892236.1 | 510 | | Incyte Unique | |
| 196 | 233 | 235169.27 | 419 | g6841281 | Human HSPC316 mRNA, partial cds. | 0 |
| 197 | 364 | 198141.3 | 505 | g7020508 | unnamed protein product | 3e−27 |
| 198 | 373 | | | | | |
| 199 | 374 | 404701.2 | 508 | g5020383 | juvenile hormone esterase | 9e−16 |
| | | | | | binding protein | |
| 200 | 241 | 330897.2 | 424 | g1504007 | Human mRNA for KIAA0212 gene, | 0 |
| | | | | | complete cds. | |
| 201 | 267 | 1248547.1 | 445 | g7023268 | Human cDNA FLJ10920 fis, clone | 0 |
| | | | | | OVARC1000384. | |
| 202 | 272 | 427529.10 | 449 | g7332115 | contains similarity to | 2e−23 |
| | | | | | Mycobacterium tuberculosis bpoC | |
| | | | | | (GB: Z95558) | |

[0218] TABLE 3

| | Human | |
|---|---|---|
| | Template | |
| SEQ ID NO | ID | Tissue Distribution |
| 490 | 1340709.1 | Cardiovascular System - 100% |
| 433 | 246916.11 | Cardiovascular System - 12% |
| 486 | 238273.6 | Connective Tissue - 10%, Female Genitalia - 10% |
| 425 | 991612.1 | Connective Tissue - 12% |
| 422 | 71944.2 | Connective Tissue - 13%, Cardiovascular System - 12%, |
| | | Embryonic Structures - 11% |
| 419 | 235169.27 | Connective Tissue - 19%, Unclassified/Mixed - 16% |
| 452 | 149914.32 | Connective Tissue - 20%, Embryonic Structures - 15%, |
| | | Urinary Tract - 14% |
| 495 | 199581.5 | Connective Tissue - 39%, Exocrine Glands - 22%, Digestive |
| | | System - 22% |
| 499 | 326679.1 | Digestive System - 100% |
| 478 | 229079.16 | Digestive System - 14%, Pancreas - 14%, Respiratory System - 11% |
| 492 | 1382922.15 | Embryonic Structures - 11% |
| 483 | 216452.26 | Embryonic Structures - 11%, Cardiovascular System - 11%, |
| | | Liver - 11% |
| 474 | 18653.18 | Embryonic Structures - 13%, Stomatognathic System - 11% |
| 420 | 238854.22 | Embryonic Structures - 14%, Sense Organs - 13%, |
| | | Unclassified/Mixed - 11%, Skin - 11% |
| 491 | 348080.7 | Embryonic Structures - 21%, Pancreas - 13%, Skin - 10% |
| 487 | 1397900.1 | Embryonic Structures - 21%, Unclassified/Mixed - 13%, |
| | | Digestive System - 11% |
| 496 | 334177.1 | Embryonic Structures - 58%, Liver - 16%, Unclassified/Mixed - 15% |
| 459 | 232376.7 | Endocrine System - 13% |
| 498 | 1099669.1 | Endocrine System - 15%, Male Genitalia - 15%, Nervous |
| | | System - 15% |
| 426 | 331609.14 | Exocrine Glands - 16%, Pancreas - 14%, Musculoskeletal |
| | | System - 10% |
| 461 | 410014.14 | Exocrine Glands - 47%, Musculoskeletal System - 22%, |
| | | Urinary Tract - 12% |
| 449 | 427529.1 | Female Genitalia - 11%, Urinary Tract - 10% |
| 411 | 1137592.1 | Female Genitalia - 67%, Nervous System - 33% |
| 442 | 198345.3 | Germ Cells - 11% |
| 401 | 348148.41 | Germ Cells - 12%, Male Genitalia - 11% |
| 415 | 27980.2 | Germ Cells - 13%, Hemic and Immune System - 11% |
| 479 | 475017.1 | Germ Cells - 14% |
| 504 | 246362.2 | Germ Cells - 14%, Stomatognathic System - 14%, |
| | | Unclassified/Mixed - 13% |
| 477 | 203528.1 | Germ Cells - 16%, Liver - 11%, Cardiovascular System - 10% |
| 427 | 234677.1 | Germ Cells - 18%, Embryonic Structures - 10% |
| 480 | 331451.18 | Germ Cells - 20%, Digestive System - 13%, |
| | | Unclassified/Mixed - 11% |
| 444 | 1307204.1 | Germ Cells - 21%, Pancreas - 12% |
| 460 | 1383610.2 | Germ Cells - 25%, Urinary Tract - 11% |
| 403 | 411384.2 | Germ Cells - 26%, Embryonic Structures - 19%, Male |
| | | Genitalia - 10% |
| 503 | 236253.2 | Germ Cells - 28% |
| 511 | 246935.4 | Germ Cells - 30% |
| 481 | 246290.8 | Germ Cells - 30%, Male Genitalia - 11% |
| 469 | 205241.6 | Germ Cells - 40% |
| 464 | 1166953.1 | Hemic and Immune System - 100% |
| 416 | 1327511.1 | Liver - 100% |
| 428 | 1099747.1 | Liver - 100% |
| 435 | 1042482.1 | Liver - 100% |
| 441 | 1001899.1 | Liver - 100% |
| 448 | 1098449.1 | Liver - 100% |
| 456 | 1035717.1 | Liver - 100% |
| 457 | 1346179.1 | Liver - 100% |
| 458 | 1002701.1 | Liver - 100% |
| 512 | 1019222.1 | Liver - 100% |
| 514 | 1022716.1 | Liver - 100% |
| 446 | 1247195.1 | Liver - 14%, Embryonic Structures - 13% |
| 431 | 234758.1 | Liver - 15%, Exocrine Glands - 10% |
| 489 | 978075.1 | Liver - 16%, Hemic and Immune System - 15%, Endocrine |
| | | System - 11%, Pancreas - 11% |
| 402 | 1383009.65 | Liver - 21%, Female Genitalia - 14%, Embryonic Structures - |
| | | 10%, Nervous System - 10% |
| 404 | 369213.28 | Liver - 23%, Respiratory System - 11% |
| 501 | 206504.1 | Liver - 26%, Unclassified/Mixed - 23%, Hemic and Immune |
| | | System - 20% |
| 405 | 369213.39 | Liver - 30% |
| 475 | 97341.1 | Liver - 35%, Urinary Tract - 27%, Cardiovascular System - |
| | | 15%, Endocrine System - 15% |
| 407 | 1245800.1 | Liver - 38%, Respiratory System - 14% |
| 438 | 252542.6 | Liver - 86% |
| 502 | 333057.2 | Liver - 88% |
| 421 | 967709.1 | Liver - 90%, Hemic and Immune System - 10% |
| 447 | 474736.11 | Male Genitalia - 10% |
| 434 | 246916.15 | Male Genitalia - 40%, Digestive System - 40%, Hemic and |
| | | Immune System - 20% |
| 410 | 308057.1 | Musculoskeletal System - 100% |
| 432 | 407217.1 | Musculoskeletal System - 34%, Stomatognathic System - 29%, |
| | | Liver - 14% |
| 430 | 174274.1 | Nervous System - 100% |
| 482 | 174240.1 | Nervous System - 100% |
| 510 | 892236.1 | Nervous System - 100% |
| 400 | 235885.5 | Nervous System - 11% |
| 414 | 234482.3 | Sense Organs - 11% |
| 468 | 1311223.1 | Sense Organs - 12% |
| 467 | 197046.4 | Sense Organs - 17%, Musculoskeletal System - 13%, Endocrine |
| | | System - 12% |
| 508 | 404701.2 | Sense Organs - 18%, Unclassified/Mixed - 14%, Embryonic |
| | | Structures - 11% |
| 450 | 228579.1 | Sense Organs - 25%, Germ Cells - 13%, Musculoskeletal |
| | | System - 12% |
| 488 | 903849.1 | Skin - 12%, Cardiovascular System - 11% |
| 471 | 474711.6 | Skin - 13%, Germ Cells - 12% |
| 505 | 198141.3 | Skin - 13%, Sense Organs - 12% |
| 424 | 330897.2 | Skin - 15%, Embryonic Structures - 14%, Hemic and Immune |
| | | System - 14% |
| 506 | 235106.13 | Skin - 23%, Digestive System - 17%, Exocrine Glands - 12% |
| 451 | 481118.12 | Stomatognathic System - 11% |
| 497 | 337394.18 | Stomatognathic System - 11% |
| 500 | 474680.27 | Stomatognathic System - 17%, Germ Cells - 11%, Embryonic |
| | | Structures - 10% |
| 423 | 332413.6 | Stomatognathic System - 17%, Unclassified/Mixed - 12% |
| 413 | 347045.1 | Stomatognathic System - 20%, Germ Cells - 17% |
| 509 | 406695.4 | Stomatognathic System - 26%, Digestive System - 10% |
| 462 | 410014.15 | Stomatognathic System - 62%, Exocrine Glands - 14% |
| 473 | 38495.8 | Unclassified/Mixed - 11% |
| 443 | 230889.9 | Unclassified/Mixed - 12%, Germ Cells - 11%, Male Genitalia - 10% |
| 455 | 232928.5 | Unclassified/Mixed - 13% |
| 476 | 242821.5 | Unclassified/Mixed - 13% |
| 417 | 223416.6 | Unclassified/Mixed - 14%, Nervous System - 14%, Endocrine |
| | | System - 12% |
| 429 | 216242.2 | Unclassified/Mixed - 15% |
| 493 | 992317.12 | Unclassified/Mixed - 19%, Exocrine Glands - 14% |
| 412 | 978146.2 | Unclassified/Mixed - 19%, Liver - 15%, Germ Cells - 15% |
| 408 | 196677.1 | Unclassified/Mixed - 24%, Endocrine System - 10% |
| 484 | 985408.1 | Urinary Tract - 12%, Female Genitalia - 12%, Pancreas - 11% |
| 440 | 400104.6 | Urinary Tract - 14%, Pancreas - 13%, Female Genitalia - 11% |
| 472 | 903554.2 | Urinary Tract - 19%, Nervous System - 13% |
| 453 | 1135179.1 | Urinary Tract - 33%, Liver - 21%, Connective Tissue - 17% |
| 507 | 235106.1 | Urinary Tract - 78%, Digestive System - 22% |
| 406 | 366288.5 | widely distributed |
| 409 | 232589.78 | widely distributed |
| 418 | 380601.63 | widely distributed |
| 436 | 480324.16 | widely distributed |
| 437 | 41856.14 | widely distributed |
| 439 | 233720.7 | widely distributed |
| 445 | 1248547.1 | widely distributed |
| 454 | 20434.12 | widely distributed |
| 463 | 1326983.14 | widely distributed |
| 465 | 244999.5 | widely distributed |
| 466 | 239501.1 | widely distributed |
| 470 | 335705.2 | widely distributed |
| 485 | 413491.14 | widely distributed |
| 494 | 200068.22 | widely distributed |
| 513 | 411426.42 | widely distributed |

The application's sequence listing, which the Patent Office published only in electronic form, follows.

SEQUENCE LISTING (514 sequences)

SEQ ID NO: 1 - DNA, 150 bp, Rattus norvegicus
  misc_feature: Incyte ID No: 700066666H1
gtccatccggaaggaagctcacctaggtttgtgggaataacagcacatatcagaagccagacatactctctggtcacgtactttgggacaggagcatgaaatgcttcctcatgacacctacagaagtagaggtctttgggtctagtcatt

SEQ ID NO: 2 - DNA, 244 bp, Rattus norvegicus
  misc_feature: Incyte ID No: 700138330H1
agccactctaactaggggcgtgctgagacaagaccacctcattcctctgctgcttttcagacaggactgtcctgccgacccaccatgatccaggctgcactgttccttggctgtatcttactgtcctcggtgaccgcctttccatggaagactcaggatggtggcctgccccatcagccagctggcacagaaactgagcctacacaactgctctacagcaagagtcctcctccgacctccagta

SEQ ID NO: 3 - DNA, 235 bp, Rattus norvegicus
  misc_feature: Incyte ID No: 700138340H1
aaaagttaaaaacctaagctcacctcgtccggtgatgctgttcgctgtttgcaatactctgaagatctacagcaaagcaaggggatcctcattcgtaaataatttccagtgcacgacggtctttgaatttaccatgtctagaatagagttcagtttattttagctcacataggaattcactggcatccatctgccgttaatataatatcaagtggttagaaataaatgcaccaac

SEQ ID NO: 4 - DNA, 304 bp, Rattus norvegicus
  misc_feature: Incyte ID No: 700230507H1
ccaacatgcagggcagcacgagaagagcgggagccatgacagatgtgcatcggcgcttcctccagctgctgatgactcatggcgtgctggaggagtgggaggttaggcgcctgcagaaccactgctacaaagtccacgaccgaaatgctactgtagataagctggaggacttcatcaacaatatcaacagtgtcctggagtctctgtatattgagataaagaaaggcatcacagaggatgacgggagacccatttatgcactggtgaatcttgctacaacttcagtttccaaaatggccacgga

SEQ ID NO: 5 - DNA, 303 bp, Rattus norvegicus
  misc_feature: Incyte ID No: 700275105H1
  unsure 61-62: a, t, c, g, or other
gtgagcgtgccgaggcgacagctgccgacctgccaggtgggtgctgtcccgaagcgcacanngatcggcgccggtttggaggtttggagcccgggacttcaacctcaccgccccatcctatgtcaccatgttgtgcaccctgttcctgctactgctggccctgggcatagtgcagacaactcggccatgtttccctggctgccagtgtgaggaagagacgtttggcctctttgacagtttcagcctgatccgagtggactgcagcagcctgggcccccacattgtgcctgtgcccatccctct

SEQ ID NO: 6 - DNA, 286 bp, Rattus norvegicus
  misc_feature: Incyte ID No: 700062791H1
ccggctcactaccccagccaccctcaccctgccagagattgccgccagcggcctcacgcggatgtttgcccccaccctaccctctgacctgctggtcaatgtctacatcaacctcaacaagctgtgcctcactgtgtaccagctgcacactctgcagcccacctccaccaagaacttccgccccgccggaggtgcagtgctccacagcccaggggcaatgtttgaatggggctcccagcgcctcgaagtgagccacgtacacaaggtagaatctgtgatcccctgg

SEQ ID NO: 7 - DNA, 279 bp, Rattus norvegicus
  misc_feature: Incyte ID No: 700250279H1
atttagaaggctgtctccttatttaaataaagttttgtttgttgtctgtagttagtgttgggcaattttggggggaatgttcttctctaatctttgcagaaactttggcttcgaacacttaaatggacaagatcaggacttgagcagaagaccgaatttaacattcaggcaggaaagacaaattttattctccatgcagtgatgagcatttaataattgcaggcctggcatagaggccctttaaggactaagtaccttaggcaggttggaaatgatggt

SEQ ID NO: 8 - DNA, 283 bp, Rattus norvegicus
  misc_feature: Incyte ID No: 700312413H1
gcgaaatccataactggtccccattagccaagaaaccttctgttgccataaattgggggcagtccacttctagcgctgtagaagtacccttagtctcagtgggcattgtgcccccagaccgcacagagaacagtcaacatcacctaaaatcattgctgacctccttggtccccagggccaaccaccgctctcccagggctgctctcatatagttcctggctataggagctaaactcatgttggtcttcattttggcctctttggttttcctaaagcacaaatc

SEQ ID NO: 9 - DNA, 294 bp, Rattus norvegicus
  misc_feature: Incyte ID No: 700308908H1
cttgactttcagtcttcaaggcatgacatggcagtggctgcttcccctaccactagctgccccctcatggtagtctgggggacagaggtggtctgtgtttacaagggcagtcaagaccagtcacccatattatgcatcaatattagacgaagccctgggctgaagggcagtgctgtcagctaggcagctactctgggtttcggagagtagtattggtttcagtctggtctcattcccattgccttaatgctgggtggtcagggccccacagagctctggatctaagctcaggag

SEQ ID NO: 10 - DNA, 226 bp, Rattus norvegicus
  misc_feature: Incyte ID No: 700139239H1
gtggcttcttccttgggggaattgtattcatgtttaataaagagattggactgttctggctcctgtctttagagcaaagcagctaagtcctgagaggagggaaggagagagggagccagggccccagggcccgcagagggactccagatgaccagtttacctgacagcaggatgcggtttgtaccacagagcccgcctcctgctggggtctttcagtggcttcttc

SEQ ID NO: 11 - DNA, 248 bp, Rattus norvegicus
  misc_feature: Incyte ID No: 700131403H1
gacccacactctatctggtactggacaacagccatgccttcaggtggcagaaacctaggaaggagcctggtctcaaaagtaatagggcccttcaggtgtcagacacagtgctgggcatcaggcagaccaaacctgacctgattggagactcatagattagagagcttggagttagacctgtggccaggaaattccatggtcaccgctcagaccagtcccgattgccttgcagacctgccttgagccgt

SEQ ID NO: 12 - DNA, 249 bp, Rattus norvegicus
  misc_feature: Incyte ID No: 700062506H1
gcgtctggtttcgggttttattttagaatttataaaattccagtgtcatccatattcatgagcctttacacatgtttgcatataatctccaaattccaaagttaaggccaagggacggatgtagctatggaaacacaggacatggaagacattcaacaaggaggaaaagacactccccacccctgccctaggctcctcaatgtcttggaggctgcagagaggtgacctgggtacagtcaatttcatagt

SEQ ID NO: 13 - DNA, 198 bp, Rattus norvegicus
  misc_feature: Incyte ID No: 700135749H1
cattgtgtcctggccacatatggaggcattgctttgttggtcctatactttaagttaaggcctaaaaaaaccccagctgtgaaagcaacataaatggattttgaaatgtctggccttatctgttaagtcccacgcctgaagaagctgatgtgaactcatcatgtaatactcaatttgtacaataaattatgaacctgg

SEQ ID NO: 14 - DNA, 81 bp, Rattus norvegicus
  misc_feature: Incyte ID No: 700330824H1
atttgctccttggtgccatacacaaatgtctcggaaactcacaagatgctgttcagttcttccagcgagctgctaaagacg

SEQ ID NO: 15 - DNA, 181 bp, Rattus norvegicus
  misc_feature: Incyte ID No: 700024728H1
aaacttggaagattttaaacctacccagaagtccacctgggtgcttgatactcatgttctctccctctctccctctctgcctctttcttcccttccccctccctcctgatttgcttgttactcttgatgcaccagcattggcgataataaattttctcgttctgagtattttgctttgcct

SEQ ID NO: 16 - DNA, 229 bp, Rattus norvegicus
  misc_feature: Incyte ID No: 700024834H1
cctctcccgggggccagatgaagggcttggatagtgtggctgcccaagccctctcccgggggccagaagcaggtcactcacctgtttcccccctgaccctccttctgaaccccatgtatcatagggaactttcaccttctggtctttctaagcaaagtgtgaataggatttttactccctttgtacagtattctgaacaatgcaaataaagagcaccgtgtctgtttcc

SEQ ID NO: 17 - DNA, 293 bp, Rattus norvegicus
  misc_feature: Incyte ID No: 700059927H1
atttctctttaaaaaatatgctaagtacaaggattctttagtacttggaaagtttaatacgcttgtcacagagctcagggtttgatgattagagcaggggattagctctatctgacaccttctgtatcttcattctaaagtggggtcatgcttttaggggtggtgtggcgggtgccatggaagtggtaatgcatgtgttgatgcagggattatgcaagctgaaacttgttctcaggggccatgtcagatgtgtgagaatacctggactcctggttttcctccatagtaaaggg

SEQ ID NO: 18 - DNA, 306 bp, Rattus norvegicus
  misc_feature: Incyte ID No: 700060675H1
gcagtcagtctctcctgctcactgttctccctctctgtgctcaagtctgtcagtgctcgctggcctctggctcttccctttggggagggagcggctgttctgcctgcttcaccgagtcttcacaagctgaggggatgaggccaggttagtaccagggaccagcaacctttcagggctccttgggggtctcaggtccacacacagtgagcatcccttgccaggtgccccatgtatctgtcagtgctgagacgccaaacacacaacctgttcccagctgctgctgggggccactgtgaccgaggagag

SEQ ID NO: 19 - DNA, 222 bp, Rattus norvegicus
  misc_feature: Incyte ID No: 700062240H1
tgtaatcatcgaatcattagtggttaatgtttgtaaaagctcttgcaatcaagtttgtgatgtattattaataatgccttatatattgtttgtagtcattttaaatagcatgagccatgtccctatagtcagtagggggcaatcttgctttattcatcctccatctcaaagcagatttgaaattacagattagtgtaagctatggataaggctggctgtttg

SEQ ID NO: 20 - DNA, 297 bp, Rattus norvegicus
  misc_feature: Incyte ID No: 700063569H1
cggggagtgcccatggatgtcggaggcgatgggaggcaaagttggcctctaggtctgtgactgatggcaacagtatccctcactgagaccgcacagtgcctctggcagagtcagattcacacagaacattctaactatgtgggtgagatactgtggaatggactgcattgcccaggtatgaggcgtgacctctttgagggatgagaggatctagaagctccctgaggatcggtagtagtgcccttatgttactgagggggtgatctcaccccagcaaagttgagggggttggtggcc

SEQ ID NO: 21 - DNA, 118 bp, Rattus norvegicus
  misc_feature: Incyte ID No: 700064131H1
attaggaaataagtgtttttgctgagccaactctaatttctagtttagctttttaaaaaaggatatatttaagataccccttaatatgacagttacattctacactatagaaattccc

SEQ ID NO: 22 - DNA, 66 bp, Rattus norvegicus
  misc_feature: Incyte ID No: 700065081H1
aaaaacctgtgatacctgtacagtaacaaatgttggcattatcagttgaactgtagatataaagtg

SEQ ID NO: 23 - DNA, 214 bp, Rattus norvegicus
  misc_feature: Incyte ID No: 700067778H1
gagcaggagatacacaaataaactccaggccccagggtgtgatagatgctgggttctcaatttggccccattataaatgatgtgttttctggagctagccacacagcgagcaccacatttacctgtttcttgagcctgacactcaactggcaggctccctgttaggatctggaagcttcttaccatgtatccaccactcatggcagggggcctg

SEQ ID NO: 24 - DNA, 237 bp, Rattus norvegicus
  misc_feature: Incyte ID No: 700123633H1
agcaagagacccacagagacagaccatctggcagccaggcagccccagaagagagacattcagacaaaggaagtcttctgctcgtccttccttaaagatcagataaacttgtcacccaacaatgatgacaagaaaagtgggagtgggaaattttccttcctaagtccctgaagaatctgagccttcaatgttaaaattttcttgattaaaatgtgctttatctcacaaaatcaacaa

SEQ ID NO: 25 - DNA, 271 bp, Rattus norvegicus
  misc_feature: Incyte ID No: 700127949H1
agggtttcctgactgccgtgactcaaggcctggagcggggagcggacaggatgagcaagtggacaagcaagcggggaccacgcaccttcactaagagtcggggtgccaagaaaacaggcttctatacaaacaggaagtttgtgcaaataaaagaaatggttccagaatttgtggtcccggacttgaccggcttcaagctcaagccctacgttaattaccgagctcctgcaggcatagacacacctctgaccgccaaagcgctcttcctgga

SEQ ID NO: 26 - DNA, 107 bp, Rattus norvegicus
  misc_feature: Incyte ID No: 700132557H1
ggagcctgctgctaaggaaccgggattctccatttcggcagtagaagcacggaccctaatggtcgcatgcgcagtgataattccgcggcctaccgaccgcgcctttt

SEQ ID NO: 27 - DNA, 243 bp, Rattus norvegicus
  misc_feature: Incyte ID No: 700135733H1
acgcaatcatgttcttcccaccctgcacccagtctgcaccccagcagaggggacccagtgcagaagctccagccttaattcttgcttcaggacccagaccagcccctcactcgagggcaacccagggtacggtgcaggtctgcctagcgtttaccactgctgttaagccacagctctctggccccacatggccgtcctcggtgaggcgccgtgtacccttcttaggccctcacgtccccagag

SEQ ID NO: 28 - DNA, 230 bp, Rattus norvegicus
  misc_feature: Incyte ID No: 700135850H1
agagaagcctgagaccatggtttgtcgtctttccaacaaccagagatgcttgattctggatggagacagccatcatgaaattgagattgcacatgtgtgtactgtccagattctcacagaaggcttcactcctggagcaggcagcactcgagccacaggcatgttcctgcagtacacagtgccaggggcagaggctgcagcacagctgaggctgatggctggagaagacg

SEQ ID NO: 29 - DNA, 255 bp, Rattus norvegicus
  misc_feature: Incyte ID No: 700137416H1
gtcggcgctttggggagcttgtcgaagatggcggcgctgtgtgtgtgtcggtttgcaagaagaggctggctgtggaagcctcccttggctacacgtagagaattctggtctagatccaggaaggagaaggagctggtggtggccgagacagtggaagaagtgaaaaaagcacctgctttggtgtgtccacccttacgaagccgagcatacacaccacccagtgatctccagagtcgcttggaatctcatattaaa

SEQ ID NO: 30 - DNA, 250 bp, Rattus norvegicus
  misc_feature: Incyte ID No: 700140375H1
cagacatggacatgaagaaggtcaactccttggacttcactgaatttgtgagtgtgtttaggaacgtcgttgaaagatgtcctctggtcgcagctgccgtctggtcccaccgtcctttctctggcttggaagacttagaaaatcacttttttgcttttatcgatgctctcccaaaatcaggccaggagggcatcctacgctgtcacccggacctagcgggccgcgatgtgcttatgggcaggctctccga

SEQ ID NO: 31 - DNA, 241 bp, Rattus norvegicus
  misc_feature: Incyte ID No: 700140450H1
tgtccctggagatactcttttcagaccaatacccacaggtccgcaggtggctggcccccttcatcgttgcctgctccctctacttcctcctctggattcctgaggaccagccatcttgggtcagtgccctggtcaagtgccagcccattctctgcctggttttgttcctgtgggctgtggctcctggtgggagctacacctggctcctgcagggagctcttacatgttctgctgttggaga

SEQ ID NO: 32 - DNA, 175 bp, Rattus norvegicus
  misc_feature: Incyte ID No: 700144406H1
ccgcagccatggatcgcggggaggaacctctgtccgcgaggccggcgctggagaccgagagcctgcgattcctgcacgtcacagtgggctccctgctggccagctatggctggtacatcctcttcagctgcgtccttctctacattgtcatccagaagctctccctgcgactgag

SEQ ID NO: 33 - DNA, 250 bp, Rattus norvegicus
  misc_feature: Incyte ID No: 700175249H1
gtttgtgaaggcccctggttgacgggttgcgggcctcgctgaccagctgggtttgcctgctgcaggcgtgacttgcatagcacccgggaaccctgcagacagagctagcgtcccagagcaactgatgtgaccaggacaaacgtgcaatatgcaaaagtgttaaaatgtgagtttgccagctttcggtctaagactgttgctcccagcctgagcgtcactggttgggatctgattgcctctctggagctgt

SEQ ID NO: 34 - DNA, 182 bp, Rattus norvegicus
  misc_feature: Incyte ID No: 700177158H1
ggcactggaacactgatccaggttcccagggaccagtgtgctatctctgggtacaagtcttccatcagctctatcctcactcaggggacaggacacagccagcttggtgcaaaatgtcctctcaaaagtaaagcagggagacccctgggaattttggggctaccctcaactgtatagtaagt

SEQ ID NO: 35 - DNA, 249 bp, Rattus norvegicus
  misc_feature: Incyte ID No: 700179766H1
gcgggaggagcccgagaggcgcgggcccgcatggttaaaccactgttaaggaatcgaactcagtcttctgaacttccctccgaggcaaagctcctctctgccaggctggaccctctttctggagggatttcattttggaagacatggatcttgctgctaatgagatcagcatctatgacaaactttcagagactgttgatttggtgagacagacaggccatcagtgtggaatgtccgagaaggcgattg

SEQ ID NO: 36 - DNA, 231 bp, Rattus norvegicus
  misc_feature: Incyte ID No: 700181614H1
acgttaactaccttttctgtatgctttccaaagtgttttccctcaacgttgattagaacatttgctcatagccagcttgcctttctacgagacaggcaggagctccgggcggtttaggtttttttttaagttgtatttcttttctcccctctctcgagtacccttgtgcagccctcccattccagccataattagcattgtgatccgagtgggcgccacatgggagaggga

SEQ ID NO: 37 - DNA, 114 bp, Rattus norvegicus
  misc_feature: Incyte ID No: 700182016H1
ggattaagtttcaatcatggaggtctgtcaggtgaggacctagctcccaaagccagcgctgagtctacaacttctcctaagaggtgttccggccggcgttggggtctctgcgga

SEQ ID NO: 38 - DNA, 329 bp, Rattus norvegicus
  misc_feature: Incyte ID No: 700185871H1
cgcctcgcttggttgccttaggtcaaagtattgggaggtttttcttcaccttgtctgggtgaagacaccacacggtctatagttgcaaaacaagcaaatggggactgaagatttcatgttacatttttaccttgcagctaacgcaagacttgcttttctctggggaccttcccaccacccagatcccctgctctgggccctccttatatgtggcttggttgatgggactcattggcttacctcagtgtgtttctagactctctgtctagaagaggttatagataggtcttatatccccatatgggatttatccacataaaacacagtct

SEQ ID NO: 39 - DNA, 312 bp, Rattus norvegicus
  misc_feature: Incyte ID No: 700198357H1
gcttggtactccatcttctggaggcaggggaggcctagcaagagttgtgctgtatcagcccttgcggggaagttatggatttgccactgctgttcctgtcagtggcctcttctgggttccagggaaggatggattaggagaaggaccctggtagctcactaagagctagaacttttgcttggtacctgaaggttttatttgggatcagcctggaggcctgagcaatcttccgttgtcacagctgtcccttggaggctgacttctgcctgggtgtttgagagcctttacctaccattcctgtggatcacagca

SEQ ID NO: 40 - DNA, 194 bp, Rattus norvegicus
  misc_feature: Incyte ID No: 700230123H1
gagtgagcagcagaggctacagggggactgctcccacttttgcagcccagctcccctagctccctgctctctgccaagcttatccccttaccctctgccccctttccacagatcattacagctttggtgagtgtgttaagggaagcactaggatgccatatagaacagggaaccaagagacgacggtcggaagg

SEQ ID NO: 41 - DNA, 297 bp, Rattus norvegicus
  misc_feature: Incyte ID No: 700248367H1
attctgagttgacggacacctcgccaaggacaagctgtctatccgggtctgactcctgctgctgtggtggggctgttgactctgggagatattccagagtagcacatggggtctgcagctcatgaggatcggaatcatccagaatagttaaaattatttaaattgtgaagcctgttgctaaagaatatttatgaacactggtccatagcctgtactaattcacacattagcaatattgactgtatctgcattaaggagccaccgtggggccgttcgagtgacccgcaaatgtgcgtt

SEQ ID NO: 42 - DNA, 228 bp, Rattus norvegicus
  misc_feature: Incyte ID No: 700250877H1
aagctttactctgaacagagagccatccgagtgaaacgcgtggtggataagaaaagactatctaagctggagcctgagcctcatacaaagaggaaagaacccgcatctgagaaatcctctcacaatgcatcacaggactctgaagaaaagcctgctgctgaggacttgccagaaaagcctttggctgaatcacagcccgaattgggaacctggggcgatggcaagggt

SEQ ID NO: 43 - DNA, 274 bp, Rattus norvegicus
  misc_feature: Incyte ID No: 700253694H1
agcatccaagaaaaggtgccatggcaaccaggatcctcctcacagccgatcagtgtggagagagcacaactgaaggttcacaatgaatttcaggccaaattccaacgcttggggctctgtcagccttgaggttcctaaaccgagttctcagtcttgagcagtcttcagtattaaaaccactgtcccgtcacctcggtttgcattactgtcttccacggaacgtttcaataactgtactgttacttatagagcagcattaatccattaaagctaa

SEQ ID NO: 44 - DNA, 118 bp, Rattus norvegicus
  misc_feature: Incyte ID No: 700303850H1
  unsure 83: a, t, c, g, or other
ttagcaggcatcaaaagaggcagagtgatttagagaaagcaatcagaacctgggagcaccatgactccttcattcctagctanatcagaactgcctgcaacactggagaagggaacat

SEQ ID NO: 45 - DNA, 285 bp, Rattus norvegicus
  misc_feature: Incyte ID No: 700305380H1
ggcagaaactgggccagttttattcagcatagcgtctttagatgcgaaggctatgcattgcagactgtaggggatctcatcagcaatggttgctggacaagcagacagatcaagagtcagttcatgggtgaggtctgtactggtcagtcttgcagagctgtgggtggacttggaagggtcaatcagtaaagatcaacatccattctctgatcttctcaagaagagccagtcacagcagccagcctagtgttcctacatactctaaaccatgtgcatgttcagcat

SEQ ID NO: 46 - DNA, 272 bp, Rattus norvegicus
  misc_feature: Incyte ID No: 700313077H1
aagaaatccatcatcccattacctcatcctgtgaggcctgaggacattgaataaccataggcagtggttcttaggcaggtgttccagacagtttgtggacatatttttttcataggatgatcttggagctcgtaggaggaaagcaagcatttaagtcttaaagacttcaaaacatgcaggctatgaacttacttcaaatcttatccttccaatgagcaatggcatacatgttcaactgtttgccatgtaaagttcaatcaaggcagctaagt

SEQ ID NO: 47 - DNA, 279 bp, Rattus norvegicus
  misc_feature: Incyte ID No: 700361225H1
ctggggcgagtgtaactccagctataaccccatggagcaccccattaatccctgctcctcgatcctggatgtgggcagttgtgtgacagctgtcagtgtctgccctgtgcttaacccagcccaaagatacattgtggcagttggattggagagtgggaagatttgtatatactcctggagcaagaccaatcaagaaaccaaagactggactagctgtatagaaacaactccaagccaaagtcacacgctgggtatcagaaggttatgctggaagagctg

SEQ ID NO: 48 - DNA, 269 bp, Rattus norvegicus
  misc_feature: Incyte ID No: 700363174H1
aggatttgaacaaaggccagattattggtgaagggcgttctggtttcctgtggcctggtttgaatgttcctcttataaaaagtggagttgttcagaacattggccagcgaagcaaagaagagcagcagaaggtggaggccgacatggctgagcagagggaagagtgggaccggaagaggaagataaaagttaaacgggagcgcggctggagtgggaacacgtggggaggtgtcagtattggccccccagacccgggacccatggagaaa

SEQ ID NO: 49 - DNA, 238 bp, Rattus norvegicus
  misc_feature: Incyte ID No: 700478138H1
aatataatgaattaagtgcctgtgagagactgaggattagcttagtggcaatgcatttgactttcttctatagtgccctgaattcattctccagtgctataagacaacaaagaaattaaaacttccttataaaactgtgcctattgacctggtgagatggctcagtgatagtggtgctttctgcccagcctgacagcttgagattgtctttcccccaggatctacatggtaggagaga

SEQ ID NO: 50 - DNA, 254 bp, Rattus norvegicus
  misc_feature: Incyte ID No: 700480077H1
tgactgaccatgatgtaaggagcgagggagcacaccactgcaaaggctgactaaggtctgttaggctcaaggtctctgttgagcccagtgtctatagtcacaccttctttgctctgggcccaggaggcctacttcttctttttctcgtggaatcctggaatcttaaagataaaagaacctagaaagaaaatcaaacccactttccttgtggggcagatggtaatatgggactgagaacagcaaacctggggtct

SEQ ID NO: 51 - DNA, 259 bp, Rattus norvegicus
  misc_feature: Incyte ID No: 700483222H1
caactgtgcacccacggaggccatccgccgaggcatcaggtactggagtggaatggtcccagagcgctgccagcgccagttcaaggaaggagaggaatggaattgcttctttggctacaaaatatatcccactctgcgctgtccagtgttcgtagttcagtggcttttcgatgaggctcagctgaccgtggctaacgtgcatctcactgggcagccggttcaggagggccagtggctgtacatccagaatctgggccga

SEQ ID NO: 52 - DNA, 258 bp, Rattus norvegicus
  misc_feature: Incyte ID No: 700491990H1
ctgagatgactctaaattgggaattaaaagcacatagcgtgggctgggggaacggcccagtgattaagagcttgtacctctcttgcagaggaccaagtttggttcccagcaccacccatattagatggctccaggatctgatgccactgaactctgggccctggcactcacatgcacatgttcttaaacataaatgtggaagtacactgagaaaggttagagtctaggatagtgggctgaacctcacctagagcctac

SEQ ID NO: 53 - DNA, 240 bp, Rattus norvegicus
  misc_feature: Incyte ID No: 700818852H1
ataaaatggtgtgctttgggacagaaaccgagcattacgagaaactatcacaaattccgagttattatcatccgggagaaaaaaaaatcgccaaataggacctgtgagatgtctttccgtttttcattcacccaagaaataaaccaagattagaaagcgaaaagggtgcattgcaaatattagatatgtttcatctgaacatattaaatgtaaatagaaaagattaatccaaaaattttg

SEQ ID NO: 54 - DNA, 273 bp, Rattus norvegicus
  misc_feature: Incyte ID No: 700937735H1
atccagtttactgataagagtaaagttgatccaggactcctgtccttttttcccactgatctacccaagtattggtgaggagcagcaagtcatggatcctggaggagggaccagtctagtctggcagtcagggctgaggagtttgggtgagaggcaggaagacaagaaagcctgggtttcaggcttgcttgaggagctacattcaaggtccattctgcagctcctcatccccagcaagaagagatccacccctggctaactcttgacgacttt

SEQ ID NO: 55 - DNA, 255 bp, Rattus norvegicus
  misc_feature: Incyte ID No: 701197728H1
ctgaggtctctgtgggtctttgttctcaactctgacaaggctcgctctgtgctacacagtttcttttcttgctcttctgccacagaaccacaaatatctccagctgggaatcagacagggacagaaatgaggaacccaggagcccaagacaatgtttcagtttcccagggtatgcgagcgatgttttacatgatgaagcccagtgaaactgccttccaaacagttgaagaggtgcctgattacgttaaaaaggca

SEQ ID NO: 56 - DNA, 259 bp, Rattus norvegicus
  misc_feature: Incyte ID No: 701257766H1
ggagcaaggagaatagtagtggtcgaagcaagcgggctctggaggaagaagagggcagcatggagggcttgtccaagaataagctgaagaaacaactgaggaaccctcacaaaacatttgatccttccctgaaacccaaatatgcaaagtgtgaccaatgtggaaatccaaagggcaatagatgtgtgtttaatctgtgccgtggctgctgcaagaagcgagctttcagggagaccgcagactgcccaggtcatggatt

SEQ ID NO: 57 - DNA, 58 bp, Rattus norvegicus
  misc_feature: Incyte ID No: 701341861H1
ctcatctggagtccttctttccagacaactctagcctgtgtcaccttgacacaataaa

SEQ ID NO: 58 - DNA, 320 bp, Rattus norvegicus
  misc_feature: Incyte ID No: 701574951H1
gcaggatgctcccggaggctgttgggtagagaccagacaggcagctaaacatcccacaatacacgagtgagccccaccgtcgagatcagtttggtcccaaatgtcactagggcagctgttcatcatagtccatctctggtactcagtacacaccggacagctccatagtttctgatagtcaccagtgtgtgtgaagaacactcccaggggaagtgagttcttcttagtggctacttgtctcaagttagcccattgtacctaacagcaatgtgcttagtggacagagcacggagacatctgccaatccactgaccgttttg

SEQ ID NO: 59 - DNA, 315 bp, Rattus norvegicus
  misc_feature: Incyte ID No: 701578278H1
gaaaatcatcatcttcctcttcaagtgtttcttcagccgatgaatccatttcttcttcctcatcttcttcctcttctagccacaaacggcataagaaaagtaagaggaatcgttcagagtcttctcgaagttcaaagaggcactggtctaagacatcttcaggctacacagatcaaagtaggaaagatgattgctatccagttccaactaatacctcagcatctttccttaatcaaaagcaagaagtggagaaacttctggacatccaggataggttacagtgtccaaatgcacaggtgaaagagaaagagaaag

SEQ ID NO: 60 - DNA, 304 bp, Rattus norvegicus
  misc_feature: Incyte ID No: 701597659H1
ggctgcttctgaagccattctaccacagggagagaagaggctaacaccgtaggacagggaggctcgctgacttcagggtgtgagcatgatggccgggcctgggttttgtgagcatcccatgctgggccttggacgtaggcagggacgttgagttaatgctgtctggtcttgggactacacagcctgtgtgcatccaaatggttccgtgggtacaggcactgctctgcatggtaaagtggctgagacggaagtggagtttgataagcaagagcttgccagaggggatcctgagctattttcacca

SEQ ID NO: 61 - DNA, 322 bp, Rattus norvegicus
  misc_feature: Incyte ID No: 701637512H1
ccagcctttcctgtgggaccctcccagcattgatgacttctgacacccgatttttttccccagcaataggcccacggtcaattttgctctggacgctagctaggcaattctttatttctattcgctgttgacactgcttatgtgcaggtagccctggatccagcagatggatggcacagtctcaagaccccgcttcagacggctctcgaatgtcctaagttgcttgccgtgtgcttctgactcaccaggtatacggaggtttccacaactgcgtactcgggtccaattcgctgttttgagaaaacctgttggtcagcttatt

SEQ ID NO: 62 - DNA, 236 bp, Rattus norvegicus
  misc_feature: Incyte ID No: 700139271H1
ccttggactacactgcaggacagaaggcaagatggcactaagcactcggatccaggctgcctgtctcctgcttctcctcctggccagcctgagcagcggtgcctatctccggcaacagacgagacagactacggctctgcagccttggcatggggcagaaagcaagactgatgacagtgcgctgctgatgctgaagcgaaggaagcgagacaccaacttccccatatgcctcttct

SEQ ID NO: 63 - DNA, 249 bp, Rattus norvegicus
  misc_feature: Incyte ID No: 700141770H1
agacgttcctctcaccatgaccattggccaaccccaacagcaggccaggagtacagctttgcttctataatattcaagatccggagaaggtttcgggaccactctgcagcatccgtgtcagccttttggcctgaggcttcctggggcacacaaagccgtgttgctcagacatcacccactgagtccaaccattaggcactggtgggtagggtgggaagatggacagaaggacacgtggagaagacagta

SEQ ID NO: 64 - DNA, 240 bp, Rattus norvegicus
  misc_feature: Incyte ID No: 700142213H1
acacagtttttccccaagagcagcctctttacttcagggaattctcggaaactttcaggattcggggggcttccctgggaggagacgagagaggattagaagcggacatccacggcttcttgtgatgaccacgccttttgtctttgctagaactctctgtgacttcccctggtgaattctaatcacggacttcacgccaagcatccggaagtacgctgagcccccatcagatcaatcagc

SEQ ID NO: 65 - DNA, 228 bp, Rattus norvegicus
  misc_feature: Incyte ID No: 700128536H1
gcgggcgagggagcttcaagaatggcggcgtccgcggcgctgatcctaccccagagccccagcatgaagaaagcagtgccgctgataaatgcaatagacacaggaagattcccacgacttctcagccggattcttcaaaagctccacctgaaggccgagagcagtttcagtgaagaagaggaagaaaaacttcaggctgcgttctctctagagaaacaagaacttcac

SEQ ID NO: 66 - DNA, 220 bp, Rattus norvegicus
  misc_feature: Incyte ID No: 700187893H1
aagatgtgctgctcttctcctggctcccaaggtatgaggcgttcacatttcctttgtcttaagttcagcctcttctcagaggtgagaaaacaataaacaaatcatctcatggactcctgttgagacacaccacatcccgtaccatggatggcgtcgttctgtcatagccgaagagtccaaaaaggtatctcaccttctaggcataactcaagggacaaaa

SEQ ID NO: 67 - DNA, 118 bp, Rattus norvegicus
  misc_feature: Incyte ID No: 700285351H1
ggggggagagagagaatgtgtgtgtgaaatacattatttcttaaagtccatttcagtggaaggccagaggatgagtatatctgtttagcaggtaaacaatgtgaatcagtgtccacat

SEQ ID NO: 68 - DNA, 154 bp, Rattus norvegicus
  misc_feature: Incyte ID No: 700480580H1
agcgccctgccttgtgcatcagtgtagacaaactgcaaatgcattgttagcaaaggtgtagtgtaggtagccacagggaacaagttgtgcacgtccatttacatcagctaagacagcatacacggcctggacacacgaaggtggtgaacactaa

SEQ ID NO: 69 - DNA, 267 bp, Rattus norvegicus
  misc_feature: Incyte ID No: 701255247H1
tgaacagatcccactctctgaagtcccagatggcacctcacacttgcagagcttccagtcccacaggccttctgatgacagacggacaggcgtgggaaaggcggtggtgagcccatcttagaggggccacctcactccgctgtggtagctggtcaagggctcaggcacgcagaagagcgttaagtctatcagctccaggaaaagaaggacggaccgtacggttcacgggcagacctaccacaggaagtgggacacacggaccatccc

SEQ ID NO: 70 - DNA, 301 bp, Rattus norvegicus
  misc_feature: Incyte ID No: 701471433H1
aagcattcctcagtgtttgtcatagacatgtattaaccaggtagaacaagccatgaggttttagactattaagtttactctcctgcttcatgttactgagtttcctttagaagcaagcttttaacacaacttctggttagtagagattttcatgacatgagtagagtcagtgagctgcaaaaaaaagtgtaaaggtgaattgttaaaaataaccccttgggctagctctgctctaggcactattgttacattacccaggtaagattacgttttaaaatgtgcctttctatgagttagaaaa

SEQ ID NO: 71 - DNA, 223 bp, Rattus norvegicus
  misc_feature: Incyte ID No: 701478494H1
acaaaacaaaacaaaaaggtctgtgttattgaggtaaaacacacagacaatcagccaacaggtgagaaacgaaaaagtgacaggcataacctggagataaaccagatgagggacctaattttttgaggtagaaaatgtacggctttgacatttaggaaaggacattcttcctatctacaaaaggaaatcatgaggagtgaagggaagcctaggataagcatgc

SEQ ID NO: 72 - DNA, 249 bp, Rattus norvegicus
  misc_feature: Incyte ID No: 701483549H1
gcgttttttcattccattccctagatgtagcctattctatgtgctaggggacaaaaggtatctttcccctatagaacaggggaagatactgaatatttacttcctttagtaacaactgaagacaactgttgtcactagacaacagtttccaagccattagatggttccaggcaaaacggtctctcccaccacagccaatgagagaacataattttcacctgacctcccaacttaacaatgtgcagcatg

SEQ ID NO: 73 - DNA, 299 bp, Rattus norvegicus
  misc_feature: Incyte ID No: 701942330H1
cagacaacagatttgtgtagacatacagcccagacagcagaacttcctgtagctcgtgtcttcttctgtgacgagagcaccccgaatccttggcaccaatcctcagccctgaagttacccagttgcctcgatttttctttcccatgttgcccatttctgatccaaaagcccttggcatttttaggaagaatagcatctgtaaactggaacgtttggcctctactccctgccttgaatctgtttcctgattgtcagctgagggtcgcagccgcctagggaccttttggtgcagacttgca

SEQ ID NO: 74 - DNA, 200 bp, Rattus norvegicus
  misc_feature: Incyte ID No: 700137978H1
ccgctatactgccctgtcacccttcacatttgaatcagggatcagtgaccctgtggaagttgtagtagaaggtagctaacatcgctgcagacacaggaaagtgcccttggaaagggttgaagacagacataatacacattcttcgtgtaagatgacttcattttctcaggacttaataaaggtcaagtaaattgttgttt

SEQ ID NO: 75 - DNA, 276 bp, Rattus norvegicus
  misc_feature: Incyte ID No: 701709967H1
cgctgctctgtggataaaatggcgctttcacagcagcaatatctgcttcgtactttcggtccactgtgggggcgatgccatgatcggagtccgtgagcagctcattttgcaggacaagattcttgttgttagacgcattctgctctgtcaattgcccagaattccgcccttccgtggtcagaactgaagagctgcttctcgacacagaccgaatgacgtcatatacggctgacctcatgtacaactcagggtgaatatcacttctccctttacagg

SEQ ID NO: 76 - DNA, 212 bp, Rattus norvegicus
  misc_feature: Incyte ID No: 700059750H1
aagacactgtcacaggcttaagttcagtatggcagctgtggaagaagtcactttccatgaaaggccatttttactgttctctaacgtatctctaatgtaagccttacacttactatcttatcttgcattgcacagagatctgtcttactgcacggcagtgcactcagaaatcagagatttttacccacctaagcttttgtgaatgaggatgt

SEQ ID NO: 77 - DNA, 250 bp, Rattus norvegicus
  misc_feature: Incyte ID No: 700123903H1
aaaccgcacaaaggtgaagcatctggatattgaagacaaagctcggcagctggaagagaaagatcgaatgatacggaagcaggatgcgttctacaaagagcagctgtccagactggaggagaggagctcagaattctacaaagttactaccgaggaatatcagaaagctgctgaagaggtggagtccaagttcaggcggtatgaatatcatccagtctgtgcagatctgcagaccaaaatccttcagtgt

SEQ ID NO: 78 - DNA, 244 bp, Rattus norvegicus
  misc_feature: Incyte ID No: 700135554H1
gcatttgtaccctgacctgcagtgacagtcctttcctgtagctcaggatttagaaaaacacaagcataaatccatacactgtgcttggaactccacaacggtgacacacaccctcttggcacacggaagtcttttgtgaggacagcctgtttttctatgcacattggtctgtgaagctagtcttgttctgtgctacaggaggggactgaagttcaaccacttgttttcaactacgaaatagtgt

SEQ ID NO: 79 - DNA, 241 bp, Rattus norvegicus
  misc_feature: Incyte ID No: 700175783H1
ccgagccgtaatgatcctgcaacagcccctggagcgaggccccccagggcgggacccacgggccaccactggggtgactcttggcctggataccagggaacccttgcacaagcacttcctgtctgaggagaacatggccacccatttctcccgactcagcctacataatgaacacccctattgcagtccccctgtgacttttcccgaagccctgccaccactcaggagcccttgccccgag

SEQ ID NO: 80 - DNA, 211 bp, Rattus norvegicus
  misc_feature: Incyte ID No: 700176825H1
gccggcgctctaaccactgagacgccttgctccccggccacgatgggggccagccatcctttatcagtcacagatccgcgtgactgttcgaccgggctctgaccactgagccatcccatcgatcgatcgctagagattcccaaagtgcaagaaaaaaaaaaaatcacccgagtgcgtgcggcgcgtgcgccaagagccgtgtgcagagcag

SEQ ID NO: 81 - DNA, 241 bp, Rattus norvegicus
  misc_feature: Incyte ID No: 700177142H1
attttttaacagaatctttttattatttttaaaagatataaaactgactactcccattagtagcaatacaaggttatgcattttaaccagactttctcaggccgcttttggatacctttagtaggtaactattttgtctaaccctcctgtaaatacctattgcgtaacagaccaacccctggggagtacagtcaagggcaccttgcacctctcccccggcgcaggcattcacccccatgag

SEQ ID NO: 82 - DNA, 305 bp, Rattus norvegicus
  misc_feature: Incyte ID No: 700185570H1
  unsure 294: a, t, c, g, or other
agcttccggttgaagatgcctacttccaatcctgcgtctttgatgtttcagtctccggtgaccccaactttactgtggcagctcagtcagctctggacgatgcccgagtcttcttgaccgatttggagaacttgcaccttttcccagtagatgcggggcctcccctctctccagccacctgcctagtccggcttctttcggtcctctttgttctgtggttttgcattcagtaagtaggccagcaacccgtgactagtttggaaacggtttgaggagagaggttgatgtgagaanacacaaagatg

SEQ ID NO: 83 - DNA, 298 bp, Rattus norvegicus
  misc_feature: Incyte ID No: 700244879H1
ctggggagtccagtcctctgtcatagtgtctgatgggacaaacaggcctagcacagccctggatgtccccaacaggatggccttaggagggggacaccggtgctgatggttgacctcagggaccccacagtgaattgattcaattgattcaatagcaatatgacccaggaggtgtcaggcggggcagtggaggccatctgaagaccagctgcttgcatccctctagcacctgctgaggcctggctccccccacccaccgtgagctgcctcggttcagcagtggtggctgccaccctgg

SEQ ID NO: 84 - DNA, 162 bp, Rattus norvegicus
  misc_feature: Incyte ID No: 700246085H1
ttctgatttaccttaaacttccccatcagtctaccctccaacagagcacacctaccacaaaaccgcactctaccttgtgaagttctttgggagccctggacaggcagtgatgccgacacttcctatgaggctcccttgtgagggccaaatgggagttgcacc

SEQ ID NO: 85 - DNA, 306 bp, Rattus norvegicus
  misc_feature: Incyte ID No: 700302152H1
ggagaacgtgagatgaaggtccttatcgtcagcaccagcccagagcgagccagcttctatctgaaactgtcagacatgggtgaccatagccctttcacctgccgctaccgtctaaacagaatgacagcgtggtctgaagacagtaagccggtgcagctaatgtggagtgatgaaactctaccagaaccagtgctcactgtagagccctcacctcatcagagctttgagcctggttcaacggtgcagtttcgatgtaccgcgcccaaggctggcctacgctctgaggctggcctacgctttggcctg

SEQ ID NO: 86 - DNA, 182 bp, Rattus norvegicus
  misc_feature: Incyte ID No: 700305538H1
tgcagatgctccccacagacactcctgctggactgaagacccaccatgtctctgctgactactgtactacttctctggggtttcattctgggcccagcaactgacacagcctgtatattcaaggaagcctcggaaaacagtcccttgcccaggccctggctttctgccaatccagtgccctg

SEQ ID NO: 87 - DNA, 301 bp, Rattus norvegicus
  misc_feature: Incyte ID No: 700307329H1
ctgcatcctggaatcattctcctcattttaatgagaatattacagcaatcatgaagaggggctttaatctagaagaactagaaaagaataatgcacacagcatacaagtcctcaagggccctcatttaactaataaaatccttttccggtcttcgggcctgacaaatggaatactagaagaaaaggacatccccgaagagtcaccaaaacagacagaagaccaacaggatggtgatgatcaagaacatgttactggtgaaaaaaatgcagagatctcagatgtgactcctgtagaagagac

SEQ ID NO: 88 - DNA, 164 bp, Rattus norvegicus
  misc_feature: Incyte ID No: 700323326H1
ctggcttactgtgtgagctgggggaaactacccaacttgtctgagcactggcctcctcatgtgttaaatagtggtagcagtgccttcctttgaagtctcattacaaggactctgcgaaaagaaaagccccaggactgttcataattcatgtaaatgttcaatta

SEQ ID NO: 89 - DNA, 287 bp, Rattus norvegicus
  misc_feature: Incyte ID No: 700328990H1
gccacagcccgatcgctgagggaagtggcccgggcccagcatgctctgcggaacagtgtacggagactacaagtgcagctgagaggtgcctcgctaggccaagcccaccaagaatttgagaatttaaaggatcgagccgataagcagaaccacctcttgtgggctctcactggtcacgtgcagcgacagcagcgtgagatggcagagcagcaacagtggctgcggcagatccagcagagactccacatggcagccctcccagcctgagactacctggatgccactga

SEQ ID NO: 90 - DNA, 251 bp, Rattus norvegicus
  misc_feature: Incyte ID No: 700330391H1
attttatgccttttgacattgaatgacctatcactgtgtgcatgttacttagcgatcaaggagccgcgcacctccgttgtgattcagcctgggaaagagacctcctcccttcagtttataaattaaaagcaggaggggcgccatcagaaagcgtcgacaatatatatactataaattttttagaaatatcaacatcgtgtcacatcaacgatgccaaattatgttagcgtgagcagaaacacggtggggga

SEQ ID NO: 91 - DNA, 289 bp, Rattus norvegicus
  misc_feature: Incyte ID No: 700363445H1
ggccaaggaatcctgagggcctcccctagctgggccctatacccccagcaccagtctgcttctgtccatcagcacagtgcaggcatggacctgaccttccccttcccacagcacatcaatgaactgaccatgaagctgagcgtggaggatgtgctgacacgggcagaggctctgtacaggcagctgacggcctgcccagagctgccacacaacgtgcaggagatcctggggctggcacagcagaagagcctagtagcccatctcctccggtatccccaatgcccttgtc

SEQ ID NO: 92 - DNA, 231 bp, Rattus norvegicus
  misc_feature: Incyte ID No: 700480903H1
agagtaggcctgttggattaatagctctccactgaaaattgttagctatgaattattaccaaagaactgtggcgatctgagctgttccattgagtctccgtgtcatttcccatgtcctggccacatttcttcttggcaatgtcttcctaactccctacaaggtatacaacggcaccatcacattggaaccctaggggagagggtctgacagacacacaggaggacaagcac

SEQ ID NO: 93 - DNA, 130 bp, Rattus norvegicus
  misc_feature: Incyte ID No: 700482908H1
attggaataagtgtacgtcttgtcagctagattcctggtgtaaaataattttactgtaggcaagttgacaggacaaaaacatcacctctgtactctatagcccattaaaattgtgtcctgcctccaccag

SEQ ID NO: 94 - DNA, 180 bp, Rattus norvegicus
  misc_feature: Incyte ID No: 700935261H1
attttttcctttcaaacctcaaatagaaatgcttcttgctgtttgtcagatttgcttaaaattgctcgtcacaaagaacatttattgtatgtgtaattgtacataaaagttttgtactttaatgtactatggttctgatgttgatagcgattaaatccagataattttatagcaaagctg

SEQ ID NO: 95 - DNA, 270 bp, Rattus norvegicus
  misc_feature: Incyte ID No: 700939101H1
cggttaacactcttggttcttttctttttattgttatttatatggatttatctagagtaccaaaagaaagttatattaaaagaacagtattaaagaattgcctaaagcattatttttgtacttacagtacaatgttttatagagctgtatgatctaactatattaagtacaattatatcattctattattaggaacatgatgattgctttagaaaatacaaatatactggtcaccttagaatcatacatcaaaatgaaatgcgaaatgac

SEQ ID NO: 96 - DNA, 239 bp, Rattus norvegicus
  misc_feature: Incyte ID No: 700950626H1
aaaaactaaaagaattcgacttgtagctagtgatggctgttgtgactgtctgctctgcatttctgtgcagagggttgttttgttttggtgatagtaggaattagatcaagggcttcctccatgctcggcaaacacaacctctgagctgcacccacagcgtctcaactgtgtagctccggctggccctggctggccccggctggcccaggactcacagaaatttgcttgtctctgtgtgc

SEQ ID NO: 97 - DNA, 116 bp, Rattus norvegicus
  misc_feature: Incyte ID No: 701316308H1
tttttaaccatggtcttggtacctgagcctcaaagatgctaagcccccagtgacctgcccctgcccctgctgttccaatgactggaattgtacttttactcataagtatattaatg

SEQ ID NO: 98 - DNA, 247 bp, Rattus norvegicus
  misc_feature: Incyte ID No: 701316810H1
agaagtcaagttcccattcatgttttactttccggtctcctttctcacaggatacacccccaaattcttacctcagactggacacataggtccttgtacatagtttccacagtttggcaaacttgtttgagctccatttccagatgactgatctttgccatcttctgggtaaattcttgtagtctttcctgaatgattttgctgtggtggctgtatacctggtacatcctttcctccaacttttctg

SEQ ID NO: 99 - DNA, 225 bp, Rattus norvegicus
  misc_feature: Incyte ID No: 701327688H1
  unsure 18: a, t, c, g, or other
ctgaaagtggtctggagngaacaccgggaggcggtgttggacagggagggcgagaacgcatctctccgagagaaactgcggcttaaagaggcagaaatctcccgcatcagagacggagaggcccagaggggaagcttcctgctaaacgctgtcttggcttacgtgcaggggtcccctctgagagccttgagtccccctaaatgaagggaggcgtgaagaactgaa

SEQ ID NO: 100 - DNA, 247 bp, Rattus norvegicus
  misc_feature: Incyte ID No: 701337820H1
gctggctcagcccctagggttcctggagcctgaagccatgctggccatccggaggggcttagacctggagggcctgcagggcaggctggccaagagcagtgaccatgtggagaagagcccacagtccctgctgcaggacatgctggccacggtgggcgtgttggaggagaatgaagctgactgctactaaggcatgtccccatcctgtccctgtctccacctgtgccagcagaaggactccagccca

SEQ ID NO: 101 - DNA, 372 bp, Rattus norvegicus
  misc_feature: Incyte ID No: 701432276T1
taaaagctgtacttccaagagaatgaggaaaaggagaatgatggacaactcaagggatatgccatactgctgaacaatttattgtttctttgaagaatcagagctgattagacttgacagtgaaaatggaccagactgttttgtgttccaagtttactctaaaaagtaataactaacttgttttccttcattcatatcagacatatttagtaagatctatcatgtgtgacacaagctcttcagacaaccaacccttcccaatattaatgggctcagtccattgtccgtcagtttggtagtggctacgggatcgggaggttcatctccacagctttgtcaaggcagaaaaagagggtgcatcatttctcttca

SEQ ID NO: 102 - DNA, 54 bp, Rattus norvegicus
  misc_feature: Incyte ID No: 701432317T1
ataaaaataagtgctgagcaatatcacataaccaataataacattcgaaaacac

SEQ ID NO: 103 - DNA, 269 bp, Rattus norvegicus
  misc_feature: Incyte ID No: 701472012H1
taaaagacctgaaatctaagcagacatcagaaagtgtcaacaaagcaaaaatgtgggctttgaaaggacagttgaggaaaagagcaagatgcaggaagtccccgctgtgagacatgtgtcagggaggctggcacagccgctctgatttcaggacagtggatccgtgctgtacatcgactgcgtctgccctgctgttaactcacttgtcagtgtctgcattgcagttacgcatttcatgtctgtaatcccgggaggcttgatcctgatgt

SEQ ID NO: 104 - DNA, 261 bp, Rattus norvegicus
  misc_feature: Incyte ID No: 701472036H1
gatgcactgaatttcctttgtcacgtagttttgattttgcagccttctgcattgcacacgtgagccgggcattagggcaagcttgagagctctcgactacatttttaaacagtgttctgtgaaggcctgtgagtgtcatgataaaactgtgaatgactacttagggactctgattagactattggttaggctccagtggcttgtataggtctccaattcctacttactttgatgtattccacaaaacccaccttggggttt

SEQ ID NO: 105 - DNA, 288 bp, Rattus norvegicus
  misc_feature: Incyte ID No: 701517108H1
tgtaaatagatgaaagatggtatgagaattttaccacttcattaataaggaacaagatgcaattatatgaaagatgttatgcctctggggtaaagaaagacacaacacagcatggccagttggacaatctctaatgctaactctgaagaccttctgtaatggagtgttgaaaaccaatgtgtggtcagaaaagacagtgctacaaaggattggggctgaaattatgtagatattcatgcatcacaaaacaacatggctgagtgaagcagaagtcctgcaatgttgtca

SEQ ID NO: 106 - DNA, 293 bp, Rattus norvegicus
  misc_feature: Incyte ID No: 701710808H1
  unsure 46: a, t, c, g, or other
caggagcactgtggaacccaggaaggcactgtggggcctgagctgnatcccagccctccacagggaaagctttcttcctggaccaggaatctgagtcagccagtgatctccagggaggaggtgtgtgggtttcgatggccgatcaattagccacatgggacaatcccagcaacgggcaaagaccaccgtcagacactgtcagcgtgttggaagcgccccaggctcctcagcattgtgcctcgccctctccctgccattctcgtctccagtcttctccagttattaaaggttac

SEQ ID NO: 107 - DNA, 73 bp, Rattus norvegicus
  misc_feature: Incyte ID No: 701241446H1
cacattgtctactactcggagaccagggcgatggcaggaggagctcttcctactctgcctgtacagctgaagg

SEQ ID NO: 108 - DNA, 241 bp, Rattus norvegicus
  misc_feature: Incyte ID No: 701711993H1
gctatctatgaacactgctacaggacataggcgtaattagtttttgccttgaaaaactggctatgttttaactaatatgtctatttgtgtttgtgaactagctcgctgataggatcctgattctattcatcgacaagaaaaaattcaaaatgcagcatcagttaggctgggttttgtacaggccccctacttcacagtgatgcaggaagatcacaagttcaaaattagcttgtgctacagt

SEQ ID NO: 109 - DNA, 230 bp, Rattus norvegicus
  misc_feature: Incyte ID No: 700250903H1
ccaagaaacaaacattttaatgcagaaaaccatgataatctacaaatgaatcacagtggaggcctataccggaccccctcaggaactgtaaggactgggacgtggacactgaactgacaacaccgtcagcatctggacatgcccaggcagctgtgctggcctcacggcacctaggccttgcccccttgccttccaccattcattccccaatgggaagaccagaagttaag

SEQ ID NO: 110 - DNA, 262 bp, Rattus norvegicus
  misc_feature: Incyte ID No: 700192259H1
ggcaagtcaactgtcaagaggagatcaaacacccctcccccaaaagaatgaatatcttggcaatctttcttgtgtgtctttttatggagatagcatgacccgagcaagtagtgacctttgccatcataggaatcactccccaggcacatggttttattggacctttgcaacacagggcaaaggtggcccaggtttggtcccctcccatagatggcaggctgagaatggtgcttctggtgtcatctgcccattcaaccacaat

SEQ ID NO: 111 - DNA, 245 bp, Rattus norvegicus
  misc_feature: Incyte ID No: 700269330H1
cttcactgcagccacgcaagccacagtagagatgactgtcagcatggctcaggttgctgatctttctccaatcccggtggtgctgtacagtgtcccaggcaacacgggtctagagctgcctgtggatgccgtggtcacattgtctcagcacccaaatatcattggcttgaaggacagtggtggagatgtgaccaggactgggctgattgttcacaagaccagcaagcaggatttccaggtgttgg

SEQ ID NO: 112 - DNA, 197 bp, Rattus norvegicus
  misc_feature: Incyte ID No: 701317696H1
gggccgctcccactactgtgtcctgtgccctcctttcaatctttaccaggccagctctcctgctgagttgtcccctgagctgaggcagggctacttggcagttaatttacaaggagaaaagggatctatctggctgacagttctggatgtccccacccaagatcaggaagtcatattgctttgggtctctggcaaca

SEQ ID NO: 113 - DNA, 303 bp, Rattus norvegicus
  misc_feature: Incyte ID No: 700230724H1
gacgttgcagagggtggacctgagactctctttaacttctggcacccgtgcatcaggacagcagagcggcgaactcccatccagggaatgaatgcacgagtgtgagacagaagtacgcagcccaacaagccctgtaccccctgtacccccagctcagtgcttcacctgattcggcagccgacacaaggacagtcaatgtgatcttccagctgtgcagtgtgccaggagccacagcctgcacacatgaatggctggatgcacacaaaccagccatggtcctaggtagtgggtgcctactgtccc

SEQ ID NO: 114 - DNA, 285 bp, Rattus norvegicus
  misc_feature: Incyte ID No: 700307025H1
caaagactgttctactccactttttctgagtccttccatggtctcctctcagctgtctgcaatctatctataattcatttgtgtgaaaagacaacattaacagtgaattcaaagaccctaactgagccaggcgctgtgatactcacagcctcagataactgaaaggccaaagtggagcatccttgggtccaggaattcaaggccaacccggacatagcggaagccgggagatacacgagacgttacacaccttcttggttggcctttatttgcagtcacagagtc

SEQ ID NO: 115 - DNA, 271 bp, Rattus norvegicus
  misc_feature: Incyte ID No: 700361295H1
ggctggctggagtatggtctcctgcatattctatggactacagctggagtgtttaatgcttagacctattcctccagttcagaagctctctgtgctggtacctgagactcaggccccagctccaaaggggactatattctcctgtctaccagagtctgctcagtgtgcttactgctgtcaggccccaggagtcctgcctctgtggcttggtcaggaggttttctcagcctcaagaagagataaatgctatcccagaggagtctaagttata

SEQ ID NO: 116 - DNA, 264 bp, Rattus norvegicus
  misc_feature: Incyte ID No: 700420930H1
gcctgtggattctatcatcggacagtctccgtggaaccactgtagggttctccctgtcccacagatgcccctgaaatagctgctgctcggaggtccctccagtctaaagctttgtgaagccccaggatggccagggcaagcagcaagtgagggtctgaggggggctgagggtaggtctggggctttctgagctcctgtctgtttagcatctgtctctttgggatacttgcctccctggaagccagagttctgattgagcagaag

SEQ ID NO: 117 - DNA, 304 bp, Rattus norvegicus
  misc_feature: Incyte ID No: 700526706H1
gctagagtgcccccaccagatctagtggaaagaactctggggttgggggtgacacttcctggtgacggtcgtttttagccatctgtccttgtggaaagcctcacttgcactgctgtgatcgccccactacgggcttgatcttcaaggacacctccatcctatccccccctatacaaaggtcccagcaaggcctttgcaagaagagctcccgtctttcccaggcctggcccacagaggagtccaccactgccttacctcactctccaggctagttcaatggcctccctctttctactacttacta

SEQ ID NO: 118 - DNA, 259 bp, Rattus norvegicus
  misc_feature: Incyte ID No: 700635732H1
ccccaagcagacgaggggcctccaggccgctctgtcgggggtgtcctgcccaacctgggtgccttggacttgctaggcccagccacgggctgtctgttggacgatggactggagggtttgtttgaggacattgatacctccatgtatgacagtgaactttggttaccagcctctgagggtctcaaacctgtccctgagaatggcccagccaaggaggaaactccagagttggatgaggctgagctggactacctcatgg

SEQ ID NO: 119 - DNA, 261 bp, Rattus norvegicus
  misc_feature: Incyte ID No: 700824178H1
gtctctcaagagcttccaagggcagcttttcctggaatccatgaccataagaaccattaggctgccttagagtactacacagggacaatcaagagcaatcttctgccacctcagagcaagatgcagtgtggaggaactcaatgattgaagtccctttactcaggcaaataagttttagccccagaccaggagtcaggtaatgagctctaggtcacagcactggggctagacaccatttctttgactttgggaaaagatcca

SEQ ID NO: 120 - DNA, 246 bp, Rattus norvegicus
  misc_feature: Incyte ID No: 701396706H1
aaatggatggatttgttatcgctctctgtcaagtacttccgtgcctcattgaatctgagccgagcacccttgaaggcccttccagcatcttctctcccagcagagcagtctgcttgtgccttctaaggaggtctcgtgccagatggtatcatgagaagacgaagcccctgctgctgccactgctggtgcctgacctgtgggatgctgggtgtaggaggctgtggacagagggaagctccagtcatg

SEQ ID NO: 121 - DNA, 279 bp, Rattus norvegicus
  misc_feature: Incyte ID No: 701475987H1
tgaactgttagtccagggagttgtcgatagcccagtgaagtgaaacggcttgtagccctgttgttatcaagatccacatcaggaaacctgaatggggccagcagaacagctcataagttaggatgcttacctctgaatgcccacgaccctgtctccagttccagcaccaccaaaaacaaacaagctcagagaacttcctgagctctttgtggtttgaagtaggtgtgaaataaccatggtaattcaacttgaattcattgacgctgttgtgctcgaagc

SEQ ID NO: 122 - DNA, 298 bp, Rattus norvegicus
  misc_feature: Incyte ID No: 701621131H1
  unsure 111: a, t, c, g, or other
tgtgacctaaacaagtgttaacagccagacaacagtccattcatctgattctgagagaaggacactatgagtttcaaaagtagctcacacgccaagtattcactggagtanaacattacatctttctcatacttacataaaaatacaaaatagtaacccagaagaaaaatctgtaagaatcgagatattgtttgtcgagtaagggggcatttgaggatacttgcaatgcatttccttccagtggcttgggtggacatgattgttatgccttcagcaccgagtccatgctatgtctcac

SEQ ID NO: 123 - DNA, 291 bp, Rattus norvegicus
  misc_feature: Incyte ID No: 701879551H1
taaacatttgggaattttcaagagtgtatacatgctacccacaggttaaatttgatttttcgttctttcctttctctttatttggaagactaacttaaaaatcattagaaatcaaatggctaatcaaatttttccttcagaaacttgttgagtagtaccatccactgtagtaggaaaagaaaaatcttttttcagacaaacactcacaaagagttaacttgtgtagaaatggcaggcagcagagttagttgaaatagttgagatttaatttaaaaaatgatttagtttgaa

SEQ ID NO: 124 - DNA, 544 bp, Rattus norvegicus
  misc_feature: Incyte ID No: 701883446H1
aagaaggagagcagtggtgtctgaggaagtcagactccacagtagcttggggtctctgagcaaggactggaacgggacatctcatgtgacctggacgcatgctgaatctctcaccatctctcagctacaccactccttctgtctggaaagcacgtaggagggcaatatgatccacacaggggcagcaagtctgtgagaccgtcacaagtcccacttcctcaaagttatactcaatgtaaagattgctaaaattggcccagttgaggacctgtaatctcagcacctgggaggctgcggcaggaggatcataaatgcaaggcacttaggctccagcccagcctggggaactccaggagactctcttgagactcggtctcaaaatccagatagggaaaagagggtgggaagctgagatagtgcagtgggtgaagggcttgctgtgcaaacctggggtcctgagttcaaatctctagtacctgtgtaaaatgctggacacagcagtgcacgcctgttacccagcatgtggggtgagggggctgacaca

SEQ ID NO: 125 - DNA, 484 bp, Rattus norvegicus
  misc_feature: Incyte ID No: 701883859H1
gccacgtggagcaggacataactcactttatctcggcaacgcaggcgtttgtgttgagaagggcattcttcctccctaggaaagaacatctggaacattcctccaaacgaggttcaaaacaatgacttcagatgaagcagactcgctggagtaaacacagcacagaggatcccgtgaagcttgtgtgcgtggactctgccagagagcagactctgggactgaaatttcaggtcagctcagagttacacccccactctcttgcaaaaggctctgatcccatgggatactcccgggaagggccctagggaaggtctcagttgctacccaagagcagagaggaccccatgacagacaaggcaccttctgccctgtggccctattccctcctctcagaaagccttcatactcggcggtctgccttgccctggaccagacaagaaagtaaatcacatttgttgattaaaaatcagcctttgtggaatat

SEQ ID NO: 126 - DNA, 239 bp, Rattus norvegicus
  misc_feature: Incyte ID No: 700122019H1
ggcgaccatgctggcctccgtggctttggagtccagcctgcccgtgcggctcgccacttatctgctctgcttgttggcccccaggaccagaacttgaactttcctttggaggcctcaaaaaacaacctgtcagagcaggggctgaaagaacccttgggcaggctggagaccttggaagagaattccaaggagttccaagatgtggtgcgggccttttatgacaccctggatgctgctca

SEQ ID NO: 127 - DNA, 253 bp, Rattus norvegicus
  misc_feature: Incyte ID No: 700276321H1
gtttttgtatgtttgttagcagcacagatgacaatgtcacacctgttctctgtctcgagggcactgttagcaagctgaagtagcactgacataaacgtgcaggaaaaatgataacagagcggtcaccagcctgtttaatcccattggttagacgcaaaggtcatcattttaatgaaatctcagaattaagaaaatagccttgttgacttggaaatccatgtagcatttgaaaatgttggataattaagccttt

SEQ ID NO: 128 - DNA, 302 bp, Rattus norvegicus
  misc_feature: Incyte ID No: 700323126H1
gctgcttactaaggcacattcagccctgaccgtggcagagcaggccaggctgaaggcttcgctgtaccttcctggccgactttgcatcctgtgttctttgctaccttaaacctatgtccacagttcttgcggcgccagccagcaggtcaggaggaggtgacaccaggtaggcatgctctggtggcagcagcaccaccgagagttgcccacctagtgtcacatgatacacaaggtcagtaggtggcatcaagcccacctcctgtagaagaggctagcaggactaaggagccatgttagcagtg

SEQ ID NO: 129 - DNA, 148 bp, Rattus norvegicus
  misc_feature: Incyte ID No: 700324604H1
gataaaatgtagtccttggttagttactgataatctagtctttgttttaccttaggtctgatgatttgagtgaataccctcttcaggaagcaaactacaccaatatctgttcctgtcatggcagctttcagtcttagcttgttttgta

SEQ ID NO: 130 - DNA, 283 bp, Rattus norvegicus
  misc_feature: Incyte ID No: 700363120H1
gactgaattattatggaaaactttagacctgtggagtggttttaaattacaaaagaagttggtatgataaagtgatggctttttttcttacataaataaaatgcaaatcaaagatgtaaccagttgtgattcattgcaagtagtcaagtgtcactaactcctaaggacaaccatttgtatcttataaatcagaattacttatagtttgaaagcactttgcacacaattcttgtatataccgaaagtaattacaggatatagtggtaatgctttaaaacatgaa

SEQ ID NO: 131 - DNA, 283 bp, Rattus norvegicus
  misc_feature: Incyte ID No: 700364810H1
atacattgtccactcttagtgaagtctgggatgtgaaggtagttgcagtgaagatggcttcagaaccacagggtctgactgacagtgtgctgttcatgggctcagcgacctgtctctactccacctcaggttcaaaagcaaataaagagtcacctcacatggtagcttaagagctgaatccccagacagtcataggttagtgttctagaggttccactgagggactgggagacagcgcactgctgcctcgggtgtgcctgagctacttggttagctcctgttg

SEQ ID NO: 132 - DNA, 224 bp, Rattus norvegicus
  misc_feature: Incyte ID No: 700510701H1
ctcctgtgagtgaagccacagatgacaggcggtctctgtgctctgccactggcaatgtcccccaggctctcttgagtaactttagttaagtttctaggatcatttgcctccctatggaaaatcatggcacttctttatcttttatttttaatgtcaatttctggaccctttttgttctctacactttcgaggcctaagttaatttagctccattttctttttct

SEQ ID NO: 133 - DNA, 252 bp, Rattus norvegicus
  misc_feature: Incyte ID No: 700810877H1
gcttttcccagccaggtgtgtccaaaaacactaagccgggatgactccggagagggatctcaggccctggggaggtcatggtgttggtggctatgaccttaagggcactgcttttcaggaatctctggaagctcctgccgcctgttacgttgtcctgaaggctctccggggtcacctgctccatccctgaaaggatgccctgcactggattcccgtcaaactcccagcacccaggagtgtgtgcagagtcaa

SEQ ID NO: 134 - DNA, 253 bp, Rattus norvegicus
  misc_feature: Incyte ID No: 700928985H1
ctcagcctcctaaggcagctggagctgctgagggagctgaatctgaggcttcgagatgagagagatgcctgtgagactaagctgctgggcagtagccacaggaaggctctagctatcgcccacaagccgggacctatctactgctgctgttgttgtggctgggctcggccccccagacgaggctctggccatcttcctagtgcccgatgaccagccagccccaaatgactcacttccttatccagaggactat

SEQ ID NO: 135 - DNA, 267 bp, Rattus norvegicus
  misc_feature: Incyte ID No: 700931410H1
ggaggatcctgccttctcaaagtcatggacctcacactccaacttttattatcccaggctcccacttgctgaaggaaaagtaccgaggtttacgcctgcctccggatactgtagcaagtggctggatccagctaaggattccagatgctcttccgacctctgtaaggccagggcgagttcaaccctctctgggcctcaggtcattcagttcaggggaggaccctcagaggagagtgtcctcctgggggatacggtgaccctcccctc

SEQ ID NO: 136 - DNA, 250 bp, Rattus norvegicus
  misc_feature: Incyte ID No: 701093657H1
ctaatctcagccaaagggtggccagaatgctccttaaaggtcccatccatggggatagagatgttttcccctatccccgaacccttctgcccccttgttatcctcacaaagcctttagcaacttcaggccaggctcaagtgactgagtcaccgtatgtctgtcctggggtttgctgtgggaaggcagtgttctctcactgtgcaggctctgccttacttacaagtcctctggtctggccaaagctgaaga

SEQ ID NO: 137 - DNA, 270 bp, Rattus norvegicus
  misc_feature: Incyte ID No: 701259518H1
ctttaatcaccaaaatagcaaggggaaatgagccatgtgtatagcagtagatggtcggcttaatatttgcaaaggcagacagagaagaacctctgctgtaggtcaccacccactccctcagccatgctaactttccatcaaagctcactgatgtggtttctactggtttgttttatgctattgtcatgaactacctgtgtttggggtgcctattaggagaagagggtaatttaccttacattttggaagctgaaaaagtctacacagcac

SEQ ID NO: 138 - DNA, 238 bp, Rattus norvegicus
  misc_feature: Incyte ID No: 701264516H2
atcgaatctgtgtgttctgtgttcctgactcagcagtttcactcgcagagatccactgcaggaaaataagtagaggtatgtcagatattgattatgggaagagatgtgcaccacagcacacgcttatgtctatatttatacttaacacatatatgaacaaatatattgttatatgtataacaaggatcagtgctaacacgaatgtctggcaagagggtaacacttaagactagcctgg

SEQ ID NO: 139 - DNA, 223 bp, Rattus norvegicus
  misc_feature: Incyte ID No: 701341715H1
cacaactaagccacccagagtacaatgggggactagggccacatgggtaattgccaaagggccacggatgggcagaggacagcagttataaaagggcaggtgaggacatcaggcaacaaccattgcctgtggtatgatccagcaccttatcctgtgacatgcatgggtgcgtatttctgtggcccaaagtcaccggaatccaagtggccaaagtggggagcac

SEQ ID NO: 140 - DNA, 535 bp, Rattus norvegicus
  misc_feature: Incyte ID No: 701434939T1
tgtaaaagcattccaagaattcacaatcacaaatgaaaatacacaacgtatgcaaaaatgtgtgttaaaacacacaaaaaaaactgtgaaggattgacttcagttgattttgaagctttttgtttatttggggaggttgtttgctggttggctggttggtcatggctgacatgatctcactatgtagcttggctgtatcctggaactcactagcctcagactcatggagatccagctgcctctgcctcctgggtactagcatgactgaccattttagttcattttaaagaaatatctacttgagcttttgctccatttgttaagacatgtcagtctggaagaacatacatgcatctgtttctgtgtatgtgtataaagagaacatgggcttcatagctggaaagccaggaatatatgaagagaaggaaacacagagcccctacagtgtgagctggccgttgtggtctcataaagccaccaaggagaaggggcagacatcagcaatgttttccaagtgagtgactcatcagtccta

SEQ ID NO: 141 - DNA, 281 bp, Rattus norvegicus
  misc_feature: Incyte ID No: 701460429H1
cctacccacacctgaacttcagcatccccatcaccgtgctccagccggccctgaagcagtacagtcagactggtgacctgtgtggcctcagagagctggaccacaccactgagcctgtcagggtcgtgtggcggctgcagcggcccctgccggaagccccccggagcaagctctgagactgtgcctccctggaagaaagtagaccactctatgccatgggaagtgtgttggtgtggcagctgtgacatctaagtcatctgccgggacagcccaagccccct

SEQ ID NO: 142 - DNA, 271 bp, Rattus norvegicus
  misc_feature: Incyte ID No: 701463285H1
ctcctataaggtcaaggataaagcaaggctcataggcaaatagcccccgatctccaccagcagccttagtttccctctcaggcctcttttgccagtgttctaacctgcatcccactcaactgtgagataacaccttgggatcctttcttatcgcattcttcgcccctaacccacccagcggcacgcatgacgcacttggcatcttgtttccccgctctcgaagtaaggttagcggctgatacaggggtagatacacactatctcttaagtt

SEQ ID NO: 143 - DNA, 284 bp, Rattus norvegicus
  misc_feature: Incyte ID No: 701605992H1
atcagcagccggccaccgttggtggtttttatgatcagtgtcagcgccatggccatcgccttcctcaccctgggctacttcttcaagatcaaggagattaagtccccagaaatggctgaggattggaatactttcctgctccggtttaatgatttggacttgtgtgtatcagaaaatgagacactgaagcatctctccaacgataccaccacacctgagagcaccatgaccatcgggcaaaccagatcgtccacccagccgccccagtccctggaggagtcagg

SEQ ID NO: 144 - DNA, 288 bp, Rattus norvegicus
  misc_feature: Incyte ID No: 701737185H1
gtgaggagagaggcctgcaccttgaagctccgcctccgcacaagccacacccttgacttctggcgctcgaggccctcctgttctgtgtgctctctctcttcccctgcccagtggctggacgacgcatttcctcagtgtgtgtcagcacatgatacgtggccttgacatttttcgtcccagttgcagtcctgtgcggcaactagttgaaaacagaaagcgaaggtctagggagcttgaagaaagaagaaacatctctgctctccagcgagttaatgacagagatgtgag

SEQ ID NO: 145 - DNA, 78 bp, Rattus norvegicus
  misc_feature: Incyte ID No: 701737221H1
taaaaccttatctcataaaagctatttgttttttaaaaaggcacacgctgtaatggagaggttcattagctgggtgta

SEQ ID NO: 146 - DNA, 284 bp, Rattus norvegicus
  misc_feature: Incyte ID No: 701920170H1
ctgggctggtggcaggctggggagctgaggagttactcctttataccatttccagctttcttgccagagagtatgcggttatcaccccgatggcacaagggccctccagaatctgtttccagcaccctcttatcctcctacatggcagagtatccaaggacgaacccgtcatcaaaatacaacacttagttttgaagctggacccaggggaactgttcagtgggtgtgtgtgggtgtctccagagtcacaaatcacacattctctggtgaatgtctcccatgag

SEQ ID NO: 147 - DNA, 292 bp, Rattus norvegicus
  misc_feature: Incyte ID No: 701922204H1
accccccaccccccatgaaaaaagccaattgttacaaaaatataaaaaatatactagcctctagttaacctttcatggaagaatctcagaactccggagcacatctggatcaaatgcccagcaagcatacatgctagcttttcggctttaaaggaaaagttatagagcattgcatcctgttgtggatgtggctgtttcctccacagtaaggtgcctctcgcttgcccgtgagtgttaacaacttgaagttctttttctcagttgcgccccctgcagtgtgggattctagggc

SEQ ID NO: 148 - DNA, 277 bp, Rattus norvegicus
  misc_feature: Incyte ID No: 701922375H1
ggaaatgcctggaacccctttaccaaaagattgccaaagccaccggaacactggtttctaccttaaaaaaaataagggggttggagggaagatatccaaggagaagataaatatcccatcagaccttcccacaaagccaagtcctcacgcatttcatgaaatgtcttttcattctcttatttctagaaaaatggctcacagcatttcaaccggcctacgagtaattcagaatgtcctagaaataggagggacgtagaagtagggtttccttccatga

SEQ ID NO: 149 - DNA, 183 bp, Rattus norvegicus
  misc_feature: Incyte ID No: 701922439H1
gtggaacttggtcctggtggcgaaggtggactagagttcttgcctgggtggctaggtgctcactacgtagagggtcactgtgaaaccctgcatagccccgggctggcttcactccgttttactttctgggctgtgtagtccttatctgtgtcatagccaggccaaacacctggctagagctct

SEQ ID NO: 150 - DNA, 286 bp, Rattus norvegicus
  misc_feature: Incyte ID No: 701922513H1
gtgagcttcaggttcaatgagagaaccggatgtaatggaaggtgctgattggcagagggagggacccaacattgacctctggcttccacagaagcatggatgtatatgcagccctccacacatgatcacacacatcacatatataaacataaaattaaaatttttttaaatatgcctcgacttagctagccaaatgctctgtgggtttattttattctttaaacgtttacatgagtcctgattagcactaccaacttacagctgcccatgatcttaaagttcaccc

SEQ ID NO: 151 - DNA, 272 bp, Rattus norvegicus
  misc_feature: Incyte ID No: 701922576H1
ggaacatcagctctagaaatctaggtagcagcttgcatgattaggtgggttcaagaccagccacggctacagaatgagcactgtctcaagcaggagggatatatcaggacattctcattcaggccccttctcaggaggcggaattgcctgatcctggtagttctgagccatgtagtgagactcctgtctcaaagcagaacagaaagccagctcagccctcaggcaagtactcgggagctgaggtgagacgaggaacgctgagctggagcctg

SEQ ID NO: 152 - DNA, 266 bp, Rattus norvegicus
  misc_feature: Incyte ID No: 701922583H1
gtgttatttcacatgaccatatgctgtttgaccccctacactagaatcacagaaggtgtgagctgctatgtgatgccagagactcaaccccagcccctgagcatcgtgagtgggcatcttcccagccccagttactccttgacacatggttgtgtatcacatcaggatttcccaccaggccagcactgtctcctatgctactgtcgatctcttcctcccctgttggcccctttggtcccacagttactcttgtattttctcatcat

SEQ ID NO: 153 - DNA, 283 bp, Rattus norvegicus
  misc_feature: Incyte ID No: 701922711H1
gaagtagctgactgaggctggagaccactggctagggcccagtggccttaccttctgggcagcagtcaccaaacagtaacaggctgttagacagctcacagggacagtcaattggaaggtccaccgggacgattgtgacaatcaggaacaaaccaaaccaaaccaagcccctcacctggctggggaacaaaagtgaaaaggaacacacaacacacctttgatgcttctcttctaaccgatatgagcccgtccccacatctgtttaaaaataaaaagccacaca

SEQ ID NO: 154 - DNA, 284 bp, Rattus norvegicus
  misc_feature: Incyte ID No: 701922744H1
cagatctgaaaaatgtattagtgaatccagataacacatgaagttcttttgattgacctgccagtgggtcatcccactccagggcttaaagacagggtagaggaattgaatcattcaaagaaaacgtaaaattaaaatgacaaccaccatcaatgaagtaactctggaattactatgaaaagacaaaacacacaaacaaagtctagaagaagaaaagaaacatagattaaagtctctaacaaattatttttattgacaatagtttcagcgaaatcatagaaaaa

SEQ ID NO: 155 - DNA, 271 bp, Rattus norvegicus
  misc_feature: Incyte ID No: 701922971H1
aggacctcccactaagtagagagtcggaccagtggctgcggctcctgatccctagacccttgatgccatgcttgttgaatttggattttcatccatgttatgatggataatatggctactgatgagcttgagcctacaaattcgaccaacgctgcttactgtctggctgctcttgagcctgagtcgactaaatcctccaatgctgctgactgtctggcctatgttgagccagagccagtgaagaagaaatatttgattctgttacttcaga

SEQ ID NO: 156 - DNA, 333 bp, Rattus norvegicus
  misc_feature: Incyte ID No: 701923019H1
aggagggagggaaaagaaaatacaagacaagacccagtgcactagacaatagacagcaacagaaacagagagctaacatcaattgtgggaatacgaggaaggtaaatccaataggaattagtgctggaagaatgagaggagggaaatagatcaccaaagagaactccaccaaccactgctggacatggtagatgagggagtgactctactaacacagaagaaaatggaaagggggatctgtgagcttctggtgtgagaaaaagttctggtttggtctggttgaattctaggtaccaggtatacacccatgttccacaggcagcagagttctga

SEQ ID NO: 157 - DNA, 323 bp, Rattus norvegicus
  misc_feature: Incyte ID No: 701923022H1
  unsure 3: a, t, c, g, or other
aanagttcaattcagttcccacacctatggtaacagcgcatttccgattataagtgagtcttcctactttaggcttttcttgaacaaagagaagggagaaatatttttcaaaaggtcttatttcattagccccaaagagagagatttctgctataataatgtgttagggaagggaatttaagaggactttgaactagcagtccctccctttcctgacactcactggtttctcttctcctgtgttctgtctttgtttatatatgggggacctaagggcttttccagtcccacacctccttgcagcttcacctcctgcctgggga

SEQ ID NO: 158 - DNA, 280 bp, Rattus norvegicus
  misc_feature: Incyte ID No: 701923218H1
atgggaactgctggtcacaggggcagctgatggagtcatccggctctttgacatgcagcagcatggatgtgctatgagctggaaggcccactgtggggaggtctactctgtggaattcagctatgatgagaatgccgtgaacagcatcggcgaggacggcaagttcatccagtggaacatccacaagagtggtctcaaggtgtcggagtacagcctcccttcagatgccactggcccctttgtcctgtctggctacagtggctacaagcaggtccaagtt

SEQ ID NO: 159 - DNA, 271 bp, Rattus norvegicus
  misc_feature: Incyte ID No: 701923240H1
gtgagctcctgtgacctcctggttgtcagtgctggccagatgtccatgtccagggccatcaacctaacccagaaactctggacggccggcatcactgcagagatcatgtatgactggtcacagtcccaggaagagttacaagaatactgcagacatcacgaaatcacctatgtggccctggtctctgataaagaaggaagccatgtcaaggtcaagtcctttgagaaggagaggcaaacagaaaaacgtgtgttggaatcagatcttgtgg

SEQ ID NO: 160 - DNA, 264 bp, Rattus norvegicus
  misc_feature: Incyte ID No: 701923241H1
  unsure 191: a, t, c, g, or other
aaagttctaagaaaaacaccacacctacattaaatactccacaagactggatgactaatcagaactctgtggctgtggagaacagagatattgtaaattcagagtcaaaattatctctagctatctttagaactcttgcagccacacatttcttactgctgtgtctgatctaagactcttttgatataaanatgtcgggaaaactttggggactgttattaatgtaggagactctgacatcttcgaacccaaaagctatgattg

SEQ ID NO: 161 - DNA, 121 bp, Rattus norvegicus
  misc_feature: Incyte ID No: 701923330H1
gtaaaatcaatcacaataaaatgaactctgagcacatactggtgatacaacagtttagccaaacacaaaatagaacacacttttaaaactgtcatatttggcaaatctttgcagaaacccc

SEQ ID NO: 162 - DNA, 259 bp, Rattus norvegicus
  misc_feature: Incyte ID No: 701925484H1
gtgaagcagttcgctttctctgctctgttgtatcagctgttgtacatttctgtgaattgaattcagcatgaaggctgccatgctgtcttcattggattacctacaccattgttttaaatgtaggaattgacctgtaaatgttaatagtggaattttctataaggaaactataattccatggtacttcagggttattgaagaagccactgatgccttctaaacacctctactcaaaagtacttctggagttcatgattct

SEQ ID NO: 163 - DNA, 269 bp, Rattus norvegicus
  misc_feature: Incyte ID No: 700025278F1
ctgatgtgctgaacagaacagtttgtccatctgacctgaagccttggctttctgaactaggctatgggttctgcttagtctttagtgcttagtgagatgtggcgctggccatttatttccctctgttctgtacagccatgtgtggacagtgctgctccagtccatgtgggctttggtgagttgagataaaggtggtgaaaaccttgacatttcctactctttggatatagattttagagcaaccggcttcggtagacttcagagcttcg

SEQ ID NO: 164 - DNA, 239 bp, Rattus norvegicus
  misc_feature: Incyte ID No: 700122008H1
attgagccaggcagagaatgtcctcagagccagagtctgcatctcccttgtattcccttccctgcctgtgtcagctcccctgtgccagcatctcctcattccttccctgaccccctgcccggcagttcctggtctttgtgcaataagatacacattccaggtggaaaaggtctccccaaggccatgggaaccccactccaccctgccctgttcagctcttgaatagccagctagggctg

SEQ ID NO: 165 - DNA, 253 bp, Rattus norvegicus
  misc_feature: Incyte ID No: 700136662H1
gttaagtgtccaagggttgtaacagatatgaggtcagagggagctcgcctggcctggacgctgcccctccacagctgacagactccaacagaagtgtatttaaatctccagtggacagagctgggcagggcaagggagggtgggcctgggttagtgagatgcaggctgctgtattttaaccagtggttcttggggaggggtgcctggagaatacaaagtcacttcccttttttgaaacaaaaccaattagaaa

SEQ ID NO: 166 - DNA, 234 bp, Rattus norvegicus
  misc_feature: Incyte ID No: 700144043H1
gcagccgtgagaggcctcccagctccaaatctaagaaaaacaagaagaatgtgtggcagaccagcacccagcagttgggcctggactgctgtgtgtgccccacctgccagcaggtactggcacacggcgacgtcagcagccaccaggcactgcacgctgcccgggacgatgacttcccctcccttcaagccatggccaggatcatcacgtagctcctgcgggtgagagcaagag

SEQ ID NO: 167 - DNA, 241 bp, Rattus norvegicus
  misc_feature: Incyte ID No: 700177423H1
tatgaagatgccatagttctcagaggttgggtatacagctaaagtatttcccatctcctttgccctggcggatcccagtttcattggttatccgaatcataagtctcccctgccctctaaaagtttgtccagagtagataacagtgttccggtttccagcacctgaatgaacaaagttaagtagatatcaaactgttgacttaaggaagatgctccttccccgactctgcagattggatac

SEQ ID NO: 168 - DNA, 219 bp, Rattus norvegicus
  misc_feature: Incyte ID No: 700247621H1
tttttttttgtgggaagagagagtcgtgttctttgtgatctttttcacagggcacctcgagcactcagactgtccaccagtgcccgaagcttctctgacaatgcgacctggtatacagcagggttctgcagctgcttatgagctggtcggaggcggctcagggactgctgggcaaaggctctggactcttccagagatggaagtggttcatacggctgt

SEQ ID NO: 169 - DNA, 284 bp, Rattus norvegicus
  misc_feature: Incyte ID No: 700251379H1
acaggcttggctgtgggagagaagattgcaagctgggtaggaatataagggagcctctgatgccaaacctagaaggaagccaagccggggaacaacactgagatccagccaaacgggcaacagagagaagctgggcaccacttcagcgagacagcagagcagagagggctcagtggaaggatgaggttagacctgcacgctccaggagaccggagccattgttaggttataacctggcttctcacttccccactctggcattttctttggctgattcttggcag

SEQ ID NO: 170 - DNA, 279 bp, Rattus norvegicus
  misc_feature: Incyte ID No: 700272988H1
cgggactggcatggtcatggcctcagccctgtgtccaccccggggccccaagctcaaaggtgctccaccttcccactactacgagaacttcctagagaaaaagggaccctgtgaccaggattacaggaagttctgggcgggcctccagggtttagccatctgtttctacaacagcaatcgggacttgcagcccctggaaaagctggacctgaggctgttttcaaagctcaaagatgaggctctgttgggaagctcacatgacactacctatcacttcag

SEQ ID NO: 171 - DNA, 280 bp, Rattus norvegicus
  misc_feature: Incyte ID No: 700306859H1
cgtccagggaccctggctggggttggggacaagagcagcagcgaagttctacttgtgcgagcaagatgaagctgctctgtgccttcttcctcctgtggcttggcctggtaggcagcctggctcagagtgaccccagccccaagggagaggagtcctactctgactggggcctgaggcagctgcggggcagcttcgagtcggtcaacagctacgtggactccttcatggagctgctgggagggaagaatggagtctgtcagtaccggtgtcgatatggaaa

SEQ ID NO: 172 - DNA, 292 bp, Rattus norvegicus
  misc_feature: Incyte ID No: 700307013H1
cacaatcctagtccacctatatgtgtcatgggcttggcaacataacacgactggccacagttcctacagcattctcagacaggggacgtccctattgttttaacagggctgcctctggaaatggaggcttgacaattgctttctagctgactcatcacctaagagtgccatgcatggttggggtattggactccctggaacacagtgaaaaacatgaatgaataacataaccaatgcccagtgatcaagtgctgtttatctaatactcctccagaagaagaaccaactagaa

SEQ ID NO: 173 - DNA, 308 bp, Rattus norvegicus
  misc_feature: Incyte ID No: 700323707H1
cccgcagcccattttggagaatgatgtgtcctcccagagaagagctgaagctatattgcacccaccgtaccttttcctaagaactttgacttaaggtccctaatggggctggtgatatgtctggtctcactgctgaaacctgcatcttgagctggccttcagaactccgagctcccttcctgccaacacctacacatagctttgtgtgtgcgaggaaagaactgtgccaacctttccctgtccggtagaatttgccgctgaaatgagaaacacatctttacccagcatcactgccagtcacagcagtg

SEQ ID NO: 174 - DNA, 265 bp, Rattus norvegicus
  misc_feature: Incyte ID No: 700513589H1
gtaagtttatattggcgaggagactgaggtacgctgtgctgatgccacgtttgcagagtgtggatcacctaagcatcagagcagagcggagtccagacgatgctgcaggcctgctgtggacagagcgcaccttgcagaggcggaagatcacaccctgtgatggctgggttactctgtcgctaccggaagtcctcgtcctctccagaatggcagtttgcttgttctcctccgacttcactctcatttgactgactcctaggagcag

SEQ ID NO: 175 - DNA, 292 bp, Rattus norvegicus
  misc_feature: Incyte ID No: 700538641H1
ggtggtggagcctgggagcaacaagggcttgggtctgagtgttcttttagaagtcaaacttgtgtcagatcctggcactttgtagctagttaaaactgataaattaacttgcagcacccccttccggaaatctctagttaaccttggaactttgttaacattggaatcctgggagtgttcttcatttccacagagaaaacttgtaacattgtcaaagttgctctctgtatcctgcccctgtaggccccttatcaaggaatcaaagttcaaaccagactgagtaggggaaaga

SEQ ID NO: 176 - DNA, 264 bp, Rattus norvegicus
  misc_feature: Incyte ID No: 700592657H1
aatgtgtgagatcttcagagaggaggggaacctcattacaaagacgaaaatagcaggaggaggagagggcggggctgcatggcacttgccctccctctcccaaaggggggggaaaaggctacaaggaagggagcggattgctgcgccaatatcagttacctcctgtgtgccagcatcctgcagtaggaactgttcttctccccagggaccaaggaccacccccacagtaatggttgggtgatactccctcaagccaaagaggag

SEQ ID NO: 177 - DNA, 181 bp, Rattus norvegicus
  misc_feature: Incyte ID No: 701190918H1
cttgtaaataaggtttgttaccaaatttgaagcccattttttttcataagtggagaacatttttccagaattaaagagacacagacccacagtctacacaaagaaagaaagagtacctggtgccttctcaaatacttgcagagtagccgtaaacgtgtgttcaaagtctgctgcccccagc

SEQ ID NO: 178 - DNA, 201 bp, Rattus norvegicus
  misc_feature: Incyte ID No: 701313456H1
aaacccactgtgtttctccctctctcacagctcaggggtcctgtcccactgccctgtgcttccagcccaagcttccctgcacaaatgcctcaccccttctgaaggatattaagaggtcttgggcctctgccacatacctcacccccaaatacccttgtcaagccagggcctgtcttctcttggcaccaaggtcacagggta

SEQ ID NO: 179 - DNA, 205 bp, Rattus norvegicus
  misc_feature: Incyte ID No: 701397319H1
aagaaagagcggtaaagtttctgctgtgccaagctttgtggacagcttttccgatgacgatctgtcctcggattgctcagagtccggagggaaagccacactccacctgatggtgctctaagtcagtgtgctatgtggtgacccggttataagagctaagatgcagggaaacttgttgggagtgttcagcagagtacaaagaaag

SEQ ID NO: 180 - DNA, 516 bp, Rattus norvegicus
  misc_feature: Incyte ID No: 701429135T1
aggctgaggctttactggcaggaactgtttccttcttcagcagacttttggatccagtaaccagtctagtggggaggggacagacactattgggatggtggagaaaagaggatcaggggactgacttaggagggacaacaggcaggcagacgggaagctgggcagggagatgacaccagaaatgactccagggaggggttacgagacgtgccccactctgtgaccagtccaggctcctccagaagtccttgcttaccactgcctttccccacagaatttagacttgtaggtagatcacggtggcatggtaccatgagtactaaggttagtgaaaatatgcacgtgacccagatgtggtggcacaggccggaaataccctcacccacgaggtagaacagaatcatggattccagaccagcctggactatgcaacaagaccctatctgtgacgtgatggtacatgtgtgagcaaccgtgtgcaagcatgtgcctgtctgcatgcttgtgggtacacgc

SEQ ID NO: 181 - DNA, 230 bp, Rattus norvegicus
  misc_feature: Incyte ID No: 701429654T1
ttctccaagtttaaaaatgagaaccaaaggtattgtcgaaaatgattcgttgtgaaagagtgagcctgtcaatcaacccaaaggaatttcttctgtgtcagagctcttctgccgtgccacatgactaattgcagtgcggttgaatttaatgtacatttaaatgtgtcttagaaaactgtgtgtgtatagaacgtaaacattaggtgattccatatttatgtctcacaaat

SEQ ID NO: 182 - DNA, 284 bp, Rattus norvegicus
  misc_feature: Incyte ID No: 701458841H1
atcacttacctagcatgtgtcaagccctgtgtttaagccctaacaccctaaaagcaaagcataaactatcagcaatgggaacttatcattgaggtgagaacaaccaaggcctacaaggacaaggtgctatgaatctgaaaccaagagaaacctcactttgacatggttcttcagggtagctctcgattagaaataagtctactgcaaatcctaagcttgagatccctgaactaggttgctggagaatgtggttagtgcagaacagaggtgagctcaagtcccat

SEQ ID NO: 183 - DNA, 264 bp, Rattus norvegicus
  misc_feature: Incyte ID No: 701470083H1
ccagctcttcactaactgaatcctaggatatgcaaattgtcataatgctggacaagtaatagtgtagtcttggaaatgactggtgatctcacagaggatttacgcctgcagagaaagatctgagtgctatctattcagaacaagactgagaaaatcagcaacagatgtgatgcttaataaaagataaataacgtccaatagtcataggaatgaacacataattatcaacagtaactccaagtataaatgattttaagtctttaa

SEQ ID NO: 184 - DNA, 288 bp, Rattus norvegicus
  misc_feature: Incyte ID No: 701562608H1
ccccacccccgttcttacttttcatggatgaactagagaatgtccgtgtgtaaatctggttgctttccgcacttaggtctcttctgtactcactagaaagccgcagaagcacatctgtgctgtgtctccctctggagcagccttatccacattgcttgccagagtcctgtggtggcctctcctgttcccatgtgtttggtggatatagtattccttcccagttgtccctaaaactgtgacgggggagtccccactcactaagcattaccagccagctatgtggcgtcc

SEQ ID NO: 185 - DNA, 446 bp, Rattus norvegicus
  misc_feature: Incyte ID No: 701884534H1
tgttccacgtgatatcctttggatggactagtgaaataactgattaaaaacaccaagcattgtctcagaggtaagccttatgccttggtacagaatctgctcagacggctgggcctcatgggagctgcttgaccgacccacagcccattcctttaaatttcccactggtcataaatcttagccttacagaataaatttaatatgtagaaacatcatgagcactttagggtgtgataaaaaagaaaaatgttcccactgaatttggggttacctattgcaaatgataaagtaagactttccatgtgatctataacaaactgaatcaacatgaaaaatacatcacagcagtagcggattgctcaaaacagttgcatatgaccacacaagctgtaaggacttttgtaaggaccgtacaacaaatacgttgttgtacatctctgctattt

SEQ ID NO: 186 - DNA, 289 bp, Rattus norvegicus
  misc_feature: Incyte ID No: 700068662H1
gtgtttcctggggccagcacggaaagcagggaaatacggtctggcgaatttaggcccccattaagtttcttgaagaatgaagggattatcacatcgccctgtttataattatggagtaatttttctatttcggcattcacttgccaagacagcagatgtccgtcatctccctagccttcttttgggaaagaggagaaaaaaggaggacgactgtgtaagccagaagaatgttccagaatgttttgctacccctggacatggtgcgtacaatggaaattaaatactctcc

SEQ ID NO: 187 - DNA, 261 bp, Rattus norvegicus
  misc_feature: Incyte ID No: 700933309H1
ccggtacattgtcattggcctacaaggatttgccgcagcttactctgccccatttggagtggccaccagtgtggtgtcttttgtgcgctaaccagagctgcaggggcaggtgacaccagaatacttctgcccaggggacagtgtgaatccaccagcactttcagactcggactcatgggaactcagaagaggaaccctgcttcgtgtgctattgttgaactagttgactgtgaggcgggagcgattcccgcttatccgctg

SEQ ID NO: 188 - DNA, 284 bp, Rattus norvegicus
  misc_feature: Incyte ID No: 700024288F2
gcttaaggctctagattctgtgagatgctacccatctgatctggaagcaatgagggaactaggaaaaactctgaggggctcttgtgttttcttcagaaataacagagcaaacccaggtggcctggcagcagcgagtgctagtgtgggggcagcagcggctgtgaggaccatgaacaggacttttatatatagcatttgcttgtcttgctgctgtgtgtgaggttgaattttcctgatgttaactttgtattgtacccgtggagtggatgagacggtctgcagac

SEQ ID NO: 189 - DNA, 265 bp, Rattus norvegicus
  misc_feature: Incyte ID No: 700064545H1
agtggatgagatgtttcccgaaggcgcggggccctatgtagacttggatgaggctggaggtagcaccgggctcctgatggacttggcagccaatgaaaaggcagttcatgcggacttttttaacgattttgaagatctctttgatgatgatgatgtccagtgaggccgtcgggtcatatatgctccatgtctgtgatgtgtctggagtctccggggacaggatcacctgatggtagacacgtgtgactatcactaggtatcaaga

SEQ ID NO: 190 - DNA, 132 bp, Rattus norvegicus
  misc_feature: Incyte ID No: 700066933H1
atctcgcgagagttggcttagcgggctaaccttgagctcgcccaaacgccgtaaagtctgctaggctggctaggtacggccatggccaagcggtttttcgaagcctacaatgagacccccgacggcacccag

SEQ ID NO: 191 - DNA, 233 bp, Rattus norvegicus
  misc_feature: Incyte ID No: 700146747H1
cttgaacacggctgcctgcgcgcagcagagctcactagctctgagctcttgctgcagcttctctcctctgccctggtttatgcctgacattagaaagcagcccaggagaaaatcgactccccggacgctgatttcctgtgtcaccttttgatgagtgttcctgggctctgccattggttttcgcctccctgcgacagagaaggaatggccatctccagggtgtggcggaaccg

SEQ ID NO: 192 - DNA, 325 bp, Rattus norvegicus
  misc_feature: Incyte ID No: 700589657H1
agacttttcaagaatatttagacagggcgtgctggcgtttgtgtgtgtgcccacgcacgcacgcacgcacgcacgcacggtggaatgcagagataggcagatgtgtatgagtttgaggacaacctagttgtctacaaaggggtcaccaagattcattcttgaaagggcagatttaagtcctgggcttggtggtataacacttttgacagcaaatgcaagatcctggccttactacctagagctgtcaaaggaaaaaagataaaccccacacaagaaaaggtactctgctgtttattccatcacagcgtttttcaacaaggagtcc

SEQ ID NO: 193 - DNA, 134 bp, Rattus norvegicus
  misc_feature: Incyte ID No: 700858043H1
ctaaggcgaggacccaccctgcccccatcaccggagagcctgcatttccctgctattgtggggatccctactgggaaacctccagggggcagctgtctcctgcagagacaagagctgaagccctggtctctttg

SEQ ID NO: 194 - DNA, 259 bp, Rattus norvegicus
  misc_feature: Incyte ID No: 700060595H1
ggacaagtccattcctgcctctgctggtttgcctggcccagaactgcactcagcacatgtgtccagcagcttgggaatgactaaaccgaagtactccaggctgactgctgacgtcgaggaggaagcatctgggggagaagcttctggctaaggggttatcagtcctctaggttagctgactctgggtctgtcttcagactgttaatttgcttagggaaatggagcaattaggtagcgtcactgaggcgggtgggtgatg

SEQ ID NO: 195 - DNA, 120 bp, Rattus norvegicus
  misc_feature: Incyte ID No: 700061212H1
aaagacagggcctctttctgtggttcaggaggctgtcctggaactcacaatgggatgacccaggctcattcctgcctcagcctctgagtgctgaaattctaggtgtgtgtctccacgcac

SEQ ID NO: 196 - DNA, 300 bp, Rattus norvegicus
  misc_feature: Incyte ID No: 700062747H1
ctaaggcgcacaacgatggcgaccgagacggtggagctccacaagctgaagcttgctgaactaaagcaagaatgccttgctcgtggtttagagaccaagggaataaaacaagatcttatcaataggctccaggcatatcttgaagaacatgctgaagaagaagcaaatgaagaagatgtactgggagatgaaactgaggaagaagaaccaaagcctatagaactgcctgttaaagaggaagaacctcctgaacaagttgttgatatggcatcagacaagaaggtggtaaaaattacatct

SEQ ID NO: 197 - DNA, 241 bp, Rattus norvegicus
  misc_feature: Incyte ID No: 700124248H1
cgtacgccttgcccgcctcctgtcatgggcagctcagagagcgccgaggcccgaacggtgtccttcgagatggatgaggaggagcgggtccgggtgctgcagggcatccggctgtccgaaagtgttgtgaaccgcatgaaggattgcagccagccttcagcaggggaacagctggctcctggtcctggtcctgagtgctccgttcctgtgcccactgtccctcaaccaaccattccagtgc

SEQ ID NO: 198 - DNA, 284 bp, Rattus norvegicus
  misc_feature: Incyte ID No: 700252787H1
aaatcttaggatataacaggaaccgtattaaggtgaaagaggggagagcccttaattgaacaaatatgaagacaaatcctgtctatttaaattgtgatgtttataaaggtgtttttacatttttttcattttttttaaaatactgcatcaagatagtatttatcttggttcgtgagttttaagcactcctgtttttctccccatgaatggtggactaacgccttgtgccttgtcatcatcaccttagacttgtcccagtttccgaagcttgaatgacacaggtg

SEQ ID NO: 199 - DNA, 199 bp, Rattus norvegicus
  misc_feature: Incyte ID No: 700272719H1
ccgtctcctacctcttcccctgctttcttggtcgcggcacggccgggccaccagactcaggactctccgtaccaccgaggtgaagctgacgctcaatgaattttgctgtctgtgccgccgtcgcctgggctcaagcgcggctccgattcctcgctgtacttgggcctgggcaagcccgacgatgcgttcctggggcccc

SEQ ID NO: 200 - DNA, 301 bp, Rattus norvegicus
  misc_feature: Incyte ID No: 700282789H1
atgaaatgagaagccctgcgaatgggaagtttgctcaaactgttcctaaaaagcagagctgggcctgcccctggcttggcctcctttcactgggacaggtcaaggcatcctaggcaaagggtaggaagtttatgagaaagctggtctaacctcacatatcttatgtcttccctccacactattaatagacacttaaaattatttcattccagtctcctatagccagggaaaaaagcctcatctgaatcattggatttttagttaaaagggagaaattatagtctttcttcaatatgtggta

SEQ ID NO: 201 - DNA, 260 bp, Rattus norvegicus
  misc_feature: Incyte ID No: 700062503H1
ccgggagatgctgtttttgtgtagagacaacattgacattgacacaggaaggagactgattgtccatgtcaatgttgtctgtgcgggagatgctgtttttgtgtagagaatgtaaattttctgtaaccttttgcaatctagttactaataagcactactgtaatttagcacagttttaactccactctgattttaacttcctttgattctttccaaccatgaaatagtgcatagtttgcctggagaatccactcacgttt

SEQ ID NO: 202 - DNA, 280 bp, Rattus norvegicus
  misc_feature: Incyte ID No: 700490891H1
gcacaggggtccacatgattggcccaatgccacgttcttgtgtagcattgcatctcacgctgacacaggtacatgtgctgttcccccgaacgaaggagggagccttttaagagattcatttgccagaataaaaatgtaagcacccctaggagggagccttttaagagattcatttgccagaataaaaatgtaagcaccccttaggtttctcttactaaccccttgcaactggtcccagaccagaattgcttcctcagaagggaaggtgcacctctctgct

SEQ ID NO: 203 - DNA, 1587 bp, Rattus norvegicus
  misc_feature: Incyte ID No: 199683_Rn.1
ctgagcgacatgaaggcagatgtgacccgcctgccagccacgctgtcccgaataccccccatcgcagcccgccttcagatgtccgagcgcagcatcctcagccgactggccagcaagggcacggagcctcaccccacaccggcctttcccccgggtccttacgccacacctccggggtacggggcagccttcagcgccgcacccgtaggggccctggccgccgcaggcgccaattacagccagatgccagcagggtccttcatcacagccaccaccaacggccctccagtgctggtgaagaaagagacggacatggtgggggcgttggtgtcagacgggctggggcttggattcggaaaggagccccggagcaggggaggtgatttgtatagacgactgactggatcccaggcctgcccttcacctaggccccgaccccggagccgacccacatctcaggccttggggcctgctgccaaccctccaccttccccaccccttgggccaccactgggctaggagcccttttgcccctctataatgcctcccttcaagaaggacccctatctctctccgcctccacacacctttcccaccaaacttgaagactgtgctggtgtgaagaggtctgggtgggagatggttagcagggtcttccaagtacccggatgccccaccaccaaatatacagcttcccaacaaatgagtatccgggaggaaggaggtggggcctcccaggcctttcctgcagcatcacctccacctcctgccaaagtgggggattagccttgctgccctttaggaacttttgtgagatctttcagagaggtagggggaacctctattacaatagatgtataatagcaggatggtaggaggagggtcggggtctgcatggcactttccctccctctgcccaaagggtgggtaaaagtctacaaggaagggtagcggattgctgctcctgggtctagttacctcctgtgtgccagcatcctgcagtaggaactgttcttctccccagggaccaaggaccacccctcacagtaatggtatgggtgatactccctcaagccaaagaggagctccccaacctgttctagggacccaggtaacctataagggtgtcagagaatacaatgggccagatatggggcagacccccactctggggctcaggctttctggaagacttctactaccctccctcctcaaaggcctgaatacagactaaatttagagtaaggtcaaggacacaaggggcccagtacaggagaccatgaccattgaccattgggaccagagcaatcacagtggataaacaggactagggagattacgggcacattccccctataaggaggggaccagggagtggacagtattgacataggggacaccccatatcctaccttgatgccccttacccagtcatctttgctcccgctcctggtctgtcccaatcccttcattctgtatcaggttattggttgtacatataaattatactttcctttctgacgtgctgtcatttttgcctggggggggaatttttgtgtggagataaagtaatgattattgctttgt

SEQ ID NO: 204 - DNA, 2195 bp, Rattus norvegicus
  misc_feature: Incyte ID No: 199776_Rn.1
gcgtgtgcattcagcctctccgagttaggacccgagacagcatccagggccctgtctttgacctctcttcctagtcttcactgttatgaccgtttcctggctattctgagggtagtcctgtgactggagcagagaagggccaccagtcatgaggagagcatctccagccttcactgtgaccaggcaaagtgtggatggtggcgggagacagaagtccctcctgtgcaggctgcttctgaactcagctgaagcttctgggtagcggagcttatctggctgcatccggataagagctctctttgtaagcgactgacttgagatagagtttgccagctccggaggtacagaacatgtgtttatgtttgccccggaagcaggtgttagagatgtgagaggcttttcttttcctgtggccttgatcctgacttgagtgacagttttaaaagaagaaggggtgtggggggtggaaacaggacttgtggagttgaaggaaccgcctgcattttcttcctttaggcacacgagacagttcttaggaagcatgtcacttcagcatcctgtcgcagtatcatctggaattgttttctttacccagaaagccttaacttgcctctagaaaatcccctggtatgacaatattgtggcataagaattcaaacacttctgctatgaaagtctgaagtaaagccacagccaaaccagagaatttcctcaggtggcctggaggctcctatgacatcaccccacctctcaccccaacaacacgagtgatctagaacaagctcctccaccggtcttcttgggcttggtctctttcaaagccacattagatcactcaaatgcttccaaaaggggcctgcttggcattaagaggccaagccattgaggactcaggtttcttctacctgttttctaagcaaaggactgtatctgtctggggtcaattgtcctaaactatatttacagctaaggacacaggagcaggcccctgctggctaaggaaccagaacggcatccagagcaaaggctgctctgacagccctgctgcctccaggtgctacagcccagcatccgcctgaagtggtccttagaaacaggccacagagtacagcttgccaacagtcaccagacaccagagcatagatagttgtctcttttggaagagtccatctgccatgttttccaactgtttttcctagcatatatgtaggtagagctttcaatgcctaatgaagaagctgaaatccctttctaattggtagattaagactgacatggcgagtttcagaaagttcacaactttttaccagactcctgtcaattagcgaaatccataactggtccccattagccaagaaaccttctgttgccataaattgggggcagtccacttctagcgctgtagaagtacccttagtctcagtgggcattgtgcccccagaccgcacacagaacagtcaacatcacctaaaatcattgctgacctccttggtccccagggccaaccaccgctctcccagggctgctctcatatagttcctggctataggagctaaactcatgttggtcttcattttggcctctttggttttcctaaagcacaaatccgtgtagactcctgttatctctccacacccattccgggtgacctggctctctcccgcagcctcaggcagaccttcactgtacctgagcgtgcaactcttcccccactgccgctgccttagtgaccagggctgtggcgggggaggggccggttcgcctccctccttttcccaggtaaaactcccactgaccacagtggtatgcttccagattgatttttttttttttgagaaccatcactttcacattcctgattctaatgtgttttgttttgttctctgtgggtttcacggaactccagatgctgccctggaaatactgtattttggagttcatgctccgtaagcccctgtgctgctgggtcctttgactcctccagcagcaggtgtttcgtacttgcatattagtaatgcaactttttctaaattattaggatatctacctttattaataagttatactaagcaatggcgtccttgatttattttatgttttcacattacttctgaatctgtggctggtgagcaaagatcattacaaacaaagactgtaatttgtgttatcttcgattcaatggaatttctttactt

SEQ ID NO: 205 - DNA, 3858 bp, Rattus norvegicus
  misc_feature: Incyte ID No: 200052_Rn.1
gtttatgatttcagataatcataccagagaacttaaatatttggtcaaactgaggtaatctcagctttcaagttggcaagtaactcccaatccagttttttgcttctatttttttttccttttctttttatttttttggtttgggcagtaaggaagattgccttgggtgttcccactaatccaatattgtgggcaaggtaagtaaatcacaacagtcgtctgttcccgtgaaagtgtgtagggtttgggggttggtctgatcactagagtggtgtggaagttacagtgtggggattctctagaagctaccggatatagattgtagtgtgtggttctcttttgaaattttttttcacgtgacttaatgtatcttaataactactataggaacttcagagcaaaggaagtggctttaatgaccctgaagggatttcttctggtgatagcttttatattatcaagtaagagattccatctcagttttgtataagcaagtctttcctagtgtaggagaaatgagtttccttgtgactaaacaagatgtaaggtatgcttattttttgtatattgtatactttgtatttgcaatttcataatgtaagaattgtggtagttcagcctgaatgtcttttagagggtgtgcttttgttgatgagggaggggaaaccttcttttttctgtagacctttgtcagataacaccatctgagtcataaccagcctggcagtgtgatgacctatatgcagagggaacagctccttgttgaatgagcgataagtaaaggcagaaaagataatgtcatgtctccatggggaatgagcaggagcctgagagtcttactgctgatgaagtctgcatatgcaataattaagcaaatgagagcaaccagtataaagttatggaaatctacctttaaaagttatggaaatctacctttaaaagttaatggcttaccaatgatttatccactaaaagtaaagaattgatgaaaaccagtgaagatcaaacgttcatctcaactgcttttacaaaagcagaataaaatgaagtaaaaattctacattaatcctggagtaaaaagaagctgagcttactgagaggagtgggatcgaagtggcttgagaggctggtgctagtatgccaatctttcgtttgcctctagactaggtttctcttctataagcagatagatgttgcttcatttcatctcggagcaggtaatactagctagactgctgttaactagataagtttaacttgtatctgcagtattgcatggtagggataaatatagctgtcttaagttaagaggaggtattgaatgttactcacctgaccccttcctagggggctcaggattgtgtagcagttttcccatccagcctcttaagaattctaagccttgtgccagtgggctttcatgtatgggatagtaagtatagtataacaggcttttgcatcctaaatttcaccgcaaatagcctcaaaacatgattagtgcctgctttaattaaatttttctacaaaattaaggaatctttaccaattgaacctgaagaccccatgaaagggacatttaatgtgctgaaagtcagatgttcatattggttaaaatttaaatgtgctcgatgtacttgtgcttaaaatcattaaatcatacaaattattaaaatacttcactagagaatgtatgtatttagaaggctgtctccttatttaaataaagttttgtttgttgtctgtagttagtgttgggcaattttggggggaatgttcttctctaatctttgcagaaactttggcttcgaacacttaaatggacaagatcaggacttgagcagaagaccgaattgaacattcaggcaggaaagacaaattatattctccatgcagtgatgagcatttaataattgcaggcctggcatagaggccctttaaggactaagtaccttaggcaggttggaaatgatggtcagataaaaggtaactacatattttgtttccagaaagtcaggggtcttatttgaccatggctaaacatctagggtaagatactttcccaattatcaaatgtgcatgttgagtttaaatgcttagaccatctcatccacgttagacttttgtcacctcacttgagccacgagttggggcatgtgggtttttaaagagttttcctttgcagaggcctcatttcatccttcatggagctgctcaggactttgattgcatataagcgcttgcctcttgtcttctgctctgctagtgagtgtgtgagaccttgcagtgagtttgtttttcctggaattggagggaagggaggagggggatggggcttacttgttctagctttttctgtacagaccacatagaatgcaggtgtcttgacctcaggtcttgtctgttctttggcaagtaatatgtgcagtactgttccaatctgctgctattagaatgcattgtgccacgtactggtagtatgattaaagttgtggtttccccaaatgtttggagtagtgtattgttggaggagaacccatgagtatatacaggctgagtgttgaggtatatggctctgcagctttaagtaacacgtgtttgtgattgtaagccaagtccctttgctgtgctgctttaggtaaatgtttttgttcatttctggtgagggggggttgggagcactgaagcctttagtctcttccagattcaacctaaaatcggaccaagaaataaattcagacaagcaacattcttgaagaaatttaactggcaagtggaaatgttcttaacagttccgtggtctttagtgcattgtctctgtaggtgtctctctcccctcccttggtcttaattcttacatgcaggaacattgaaaacagcagacatctattcgagggcccagagaagccagacccagtaaggaaaaatagcctatttactttaaatcgataaaagtgaaccagacattccattatcaatgtggggattgggaagccctagttctttcagatgtacttcaaactagaaggagcttccagttgaattcaccagtggacaaatgatgacaacagggtgaacaagccttttcttgtttaagattagttactggtaaattagtgttgaattctcttcagcttcatgctgaagcagctagcatgtaatgttttgttggccttggggtgggaggggtgaggtgggcgctaagccttttttttaagattttccaggtacccctcactaaaggcactgaaggcttaatgtagcacagcggagccttcctgtggcaagagtcaagcaagcaaagtggtatcatggttggttttgattagcagtgaggactaccctacctcaacaccttgactggagttgaaagaaacattcaaagaaaatacttgagaggccctgggcttgttttaacatctggaaaagctgtttttatagcagctgttagcagcccaaacctcaagttgtgcttgaaggggagggaaaagagggaaagtgggcaaccagttttccctagacttttccagagtacctgttacaaggtctccccacaagtggattctctgccacatcgacaccctgtgcctttggcctaatcacagacccttacacccctcaccttgatgcagccagtagctggatcctatgaggtcatgatgcgtaatacggtattcaaggtaaccatggtgccaaggtcccgtgggttgcaccagacaggagaaggccattttttaccccttgcctgttaatttaacaagaccacagctcagtagctaaggtgttttatatgcatagcacctattcagactaaaacaaaccagtcaagggtatagtaatagcaatgtttgatacaaagct

SEQ ID NO: 206 - DNA, 5191 bp, Rattus norvegicus
  misc_feature: Incyte ID No: 200489_Rn.8
gggctgagggctcagacctacccttccctgcccctgtccaccatgaggagaaacaagctgcccataccagtctttcttttactgctcctgcttcttcccagagatgccaccgcagctactggaaaaccacgatatgtggtgctggtcccctcagagctctatgcaggagtccctgaaaaggtctgtgtccacctcaaccacctgaacgagactgtgacactcaacgtaactctagagtatggagtacagtactcaaacctcctcatagaccaggctgtggataaggactcctcctactgcagctctttcacgatctcaaggccgctttcaccctcggctctcattgctgtggagataaaaggaccaacgcaccacttcataaagaagaagtcaatgtggataacaaaagctgagagcccagtctttgtccagacagacaaacccatatacaaacctggacagacagtgaaattccgagttgtctctgtggacatcagttttcgcccggttaatgaaacgttccccgtcgtttatattgagaatcccaagaggaacagaatctttcaatggcaaaatgtcgatctaccaggaggactgcaccagctctctttcccactgtctgttgagccagctctaggcatctacaaggttgtagtggagaaggactcaggggagaaaataggacattcctttgaggtgaaggaatatgttttacccaaatttgaggtgcaagtacaaatgcccaagacgatggctttcctggaagaggaacttgttgtaactgcttgtggcttatacacatacggaaagcctgttcctggtctggtgacaatgaaagtatgcagaaaatatacacagtcctactccaactgccatggccaacactcgaaaagtatctgtgaagaattcagcaaacaggcagatgaaaaaggatgtttcagacaagttgtagaaaccaaagtgttccagcccagacagaaaggctatgacatgaagatagaggtggaagccaagatcaaagaggacggaacaggaatagaactaactggtactggatcatgtgaaatcgcaaataccttaagcaaactgaaatttactaaagcgaatacattttacaggcctgggctgcctttctttggacaggttcttcttgttgatgagaagggtcaaccaatccccaacaaaaatctaactgtccaagtgaattcagttaggtcccagttcacttttactaccgatgagcatggcttggccaacattctcatcgacaccaccaacttcacgttttcgtttatgggactcagggtcatctacaagcagaacaacatctgctttgataactggtgggttgatgcatatcacacacaggcagatcattctgcagctcgcatcttttccccaagctcgggttaaaatccaacttgaacttgttcttggtactttggcttgtgggcaaactcaggagattcggatacacttcctcttgaatgaagatgccctgaaagatgcaaaagacttaaccttttactacctgatcaaagcaaggggaagcatctttaactcaggaagccacgtgttaccgcttgaacaaggaaaagtgaaaggagtagtttccttcccaattcgagtggagccaggcatggctcctgtcacctaagctgattgtctacactattttacctaatgaagaacttattgcctgatgttcagaaattcgacattgaaaagtgttttgccaatacggtgaatttgagtttcccatcagcacagagcctgccagcctctgacacccacctgacggtcaaagccacacctctgtccctgtgtgccctcactgcggtcgaccagagtgtgctgctactgaagcccgaagccaagctctctcctcaatcaatctataatttgctgccacaaaaggctgagcagggggcttacttaggacccctaccgtacaaaggcggtgagaactgcatcaaagcagaagacatcactcacaacggcatacgtgtacacaccaaagcaggatctgaacgacaatgacgcatacagcgttttccagtccataggattcaaaatttttaccaacaccagagtccacaaaccacgctattgtccaatgtatcaagcctatccgcctttgccctacgtaggagagcctcaagccttagctatgtctgcaatcccaggagccggctacagatcaagcaacattaggaccagctcaatgatgatgatgggcgcattagaagctagctcaggaggtagaagtaagacgagacagggcggaagtacttcccggaaacctggatctgggacatggtgccgctggacttatccggtgacggtgagttgccggtaaaggtccctgacaccatcactgagtggaaggccagtgcattctgcttgtctggaactactggccttggtctctcctccaccatctcccataaagtcttccagcccttcttcctggagctcactctcccctactctgtggttcgaggcgaagcattgtagcctcagagctaccgtactcaattatatggctcactgcattcgtgtccatgtgaggctagagacttctcctgatttcctggcagtccctgtggggagccatgaagattctcattgcatctgtgggaatgacataaaaaccgtgtcctgggctgtgaccccaaagtcgctgggggaggtgaacttcacagctactgcagaagctttgcagtctccagaacttgtgtggcaataaggtggcagaagtgccagcccttgtacagaaggacactgtagtgaagcccgtaatagtcgagcctgaaggaattgagataggaacaaacgtacaacacactgttatgccccacaagatgctgagctacaggaaaattggacactggatcttccagccaatgtggttgtaaggatctgccagggctacacagtccgtttctgggcgatatactaggctctgcgatgcaaaacctccagaatcttctccagatgcccctatggctgtggggaccaaaatatggtcctcttcgtccctaacatctacgttctggagtatctcaatgagacacagcagctgacagaggcgatcaagtccaaggccattaactacctcatcagcgggtaccagaggcagctgaactatcagcacagtgacggttcatacagcacattcggggaccgcggtatgaggcacagtcagggaaacacttggctcactgcattatgtgctcaaggccttcgctcaagctcagtcatacatctatatatgagagacacacatcacagatgctttcaattggctctcgatgaaacatagggagaacggttgtttccaacagtctggatccctgctcaacaatgcgatgaagggtggtgtggatgatgaagtgacactctctgcctatatcaccattgctctgctgtgagatgcccctgcctgtcactcacagtgttgttcgtaatgctctattctgcctggaaacggcctggggctccattctcaaacagcccaagaaagtcatgtcttacaaccaaaagcactgctggcctatgcctttgccctggcaggaaacagagccaagcgaagcgagcgtgcttgaatccctaaacaaagacgctgtgaatgaggaggaatcagtgcactggcaacgtcctaagaatgtcgaggaaaatgtccgggaaatgaggtccttctccttataaaccacgggcgccttgtgctgaaggtggagatgacagcttacgtgcttctcgcctacctcacctctgcatcttcccggcctacgccgagacctttcgttcagtcggacctgactacagcatccaagattgtgaagtggatcagcaaacaacaaaactcccatgggggggttctcctccactcaggatacagtggtggctcttcaagccctctccaaatatggagcagccactttttacgaaaagtaataaagaagtgtcggtcaccatcgagtcttcagggaccgtctctgggactctccatgttaacaatggcaatcgcctgctgctgcaggaagtcaggctggcagatctgcccggaaattacatcaccaaagtgtcagggtctaggatgtgtgtacctccagacatctctaatagtacttactatccttccggaggcagacaggacgaagcgcccgttcactgctgaaggtcgacactctccccgttaaactgttgataaggcaggactatctacagaaaagttcaagatccacatctaacgtaagctgacattggagaatcgaccctactctctatactatggtcattgttggatgtgaagatggtgtcaggtctgtcatacctgtgatagcctatccgtgaaaatagctccaagacctagtcttacattctagaggactgaagtgaacacctaaccacgttctaatctactattggtataaagctaacctaatctaaaccatgggtttctccttcgcggtggaacaagacattccagtaaagaacttataaaccagccccagtaaaagtctacgattattatgagacagatgaattcgccattgaagaatacagtgcccctttcagttctggtacagtatactcgaatcctatgccaacctgaagaaagcaaaagagtccctgcttgggcctccatactagactgttttttgagtttaacgttttctattattaactggactgattcaagtacactgtagaaattcttaacagaaaaaaaaatgctagtgaactctaattactactacctggactaacttgtttttaactaaattcatgaatttgagagatgtatttgagagagaacatgaagttgggtagagaggaaggcagaaaggacctgagaggagaaagaatatgggcaagatacataaaattcttcaagttaagaaatacgtatagaaaatttgtgagacataaatatggaatcacctagtgtttacattctatacacacacagttttctaagacacatttaaatgtacattaaattcaaccgcactgctattagtcatgtggcacggcaggagagctctcactcagaagaaattcctttgggttgattgacaggctcactctttcacaacgaatcattttcgacaatacctttggttctcatttttaaacttggagaaaatctgagaaaatctgagaaaatgtttcgtcattaaagaca

SEQ ID NO: 207 - DNA, 1189 bp, Rattus norvegicus
  misc_feature: Incyte ID No: 200747_Rn.2
gccgcagtcgtggatcgcatggaggaacctctgtccgcgaggccggcgctggagaacggagagcctgggattcctggacgttacagtgggctcccttgtgggccagttatggctggttacatcctacgtttcagcctgcgatccattactcatacaattgtcatccagaagctctccctgcgactgagggctttaaggcatgaggcagctgtgaccaatgctgaggctgttctggagcctgatgttgttgttaagcgagcaagaggctttagcagctgctccgtttgagaatgctcggaagatctgaatgcccgatgttgacaaaacatataggaaaaactaaagacagcttggaagaagagacaataggagacagaagcattgaaatgtgggacagcatgcaagaaggcagaagttacaagaagaaactcaggaaggcctcaggaaggaagatgtgtcctggaccttctacttcatcggtcatccccaaaggtaaaatctgactaaaaagcctttacggggaggtggttataaccctctgacaggtgaatgggggtggaacctgctcctgtgagacctggacgcatggggcccatcatctggtggatgtaagcttagactcttgttagtgtcgctttgacattaagcaaggtgaaccctttaccctctactcaatgtgccttacgcacactttcacagtgactggccaaggagaggtagggctgatttctgttctgaacacctcatattttaagggctttggtcatagacattgccaactaggccacactttatgacgagacagctattggtgtttgtggccacttgcttagtctagtaggttggaggcttcttgactgtttctctagacttcatacgaggaggcacagtgatggccctttggggcagaagtaccttgatgacagaacagggtggtctcatgtgaacaggaatgcgtcgaactgatgtcattccattattaaaatggtgagcccaaccagtgaggattaactgatgtaacaccacgttgatggggtttgcttctgtatatttattttatgtacagaacctttgtaaaaaagaaaaaagttaactacttaaaaagtaacatttttagcatctttattaaactcaaggaaatttctttgtgagcttgactttgtcagacagtaaacagctttttatcagt

SEQ ID NO: 208 - DNA, 1018 bp, Rattus norvegicus
  misc_feature: Incyte ID No: 200766_Rn.7
tctaaaactaaatatttactgactggataagtctcatgagtcatgcgtattttcactccattccctagatgtagcctattctatgtgctaggggacaaaaggtatctttcccctatagaacaggggactctactgaatatttacttcctttagaaacaactgaagacaactattgtcactagacaacagtttccaagccattagatagttccaggacaaacggactctcccaccacagccaatgagagcacataattttcacctgacctcccaacttaacaatgtgcagcatgtggatctagaaaatcttccccggtatagcaggctagttgtacaaagcccaggtggtctgtgagccatgagctcatcttaactgtctgcagcagccccattgattgccaagtgggagtggtcactttctgatccattttagaacatctctgagagtgtgattccagcaatcattgagaagtacttaagaggaacagatgaccctgccaaaaagaaggaacttctcctggacatgttttcagatgtctttttcggtatcccagctgtactcatgtcccgtagcctcagagatgccggagcgcccacctacatgtatgagtttcagtatcgcccaagcttcgtgtctgaccagagaccccagacagttcaaggagaccaatcttagcaagttggtgatgaagttctgggccaactttgctcgaaatgggaacccaaatggagaggggctgcctcactggccaaaatatgatcagaaggaagggtatttgcagattggtgccacaacaccagtaagcccagaaactgaaaggagaagaagtggctttctgaactgagctcttggctaagaatccacttcagacagaacacactgaacacacataaatgggtctctgcaagcctcagtaccagaggagcaaagatggggctattccacaaaggatggctatttgccaaagatgaatcttacagaggaaactgcacaattgtacagttgggtatttgtatc

SEQ ID NO: 209 - DNA, 1911 bp, Rattus norvegicus
  misc_feature: Incyte ID No: 200858_Rn.1
cggccgcactggaagcccgaacaagttcggaccaagcgtttcaaagatggcatcaccaacaagctattggcctgctatgtggaggaagacatgcgggactgcgtgctggtccgggtgtacggggagtggacagagttgctggtggaccgggagaatgagatcagaaacttccaactgctgcgagcgcacggctgcgcccccaaactctactgtacctttcagaacgggctatgctacgagtacatgcagggtgtggccctgggaccagagcatatccgagagccccagctcttcaggttaatcgccctagaaatggcaaagattcacaccatccacgccaatggcagtctgcctaagcccactctctggcataagatgcaccgctatttcacgctggtcaaggatgagatcagtcccagcctttctgcagatgtccccaaggtagaggtgttggaacaggagctggcctggctgaaggaacacctgtcccagttggattcccccgtggtgttctgtcacaatgacctgctctgcaagaatatcatctatgacagtgacaaaggccacgtgcgcttcatcgactatgaattacgcaggttacaactaccaggctttcgacattggcaaccatttcaatgagtttgcaggtgtgaatgaggttgattactgcaggtatccagctcgggagatccagctacagtggctacgctattatctggaggcacagaaggggacagctgcgtcccccagggaggtggagcggctttacgcacaagtcaacaaatttgctctggcatcccatttcttctgggcactctgggcactcatacagaaccagtattccaccatcaactttgacttcctcaggtatgcagtgatccgattcaaccagtactttaaggtgaagcctcaggtgtcagccttggagatgccaaagtgaccagcctcctgtttctccatgccctcttgctgccagaattgctccccggggtacccttctgccttggacttggcacactgggacaaggtgagcatctttggagaaggcccccccccagtggatgccaacaaagacctcactttcctgtttggaggggctgccgagccccagcgttgcgtgggggatcctcttcaccctgccaggcttggagaggaagtgcctgcagatggctggggcctgcactgccaccctgtcgtgagagcacagtgtagccagcccaggcttgctagagcttgggctgctctcagtcccgtccttgacccttcctggcaggggaggggaagggcttgtttctacctctggtgccagcctccagctgagccatgtatgccccagtgagaggtgctgagctccaagcctagcaggatagccaattctagctgtcatcttaggggggagaggtccctagctgcaccctgacagttcctccagcagctgcctttatctgatggctgcctacttctccaaagccagatgccatccagtccactcccttccctaggtcccctacctcgtgttctctgactaggtaccctgacaagaaggaagaagggaacagagacactgggagataaggacaatggaccaatgagtacaatggggacaaggtaacacagaagaccagcagcaatcacatcacacactctcccccttctattgctgaacttaaacttaatggtcttcccattggggaatgaaataggatggaaggcaagggggaaaggcaataaggtgcagagaggccagcacagctagcctgggcaatgtccagatgctgacggatgattgtcagttacagtgtaccacgtcaccagtcattacagttcctgatggggtcctactataggcggtccactgtgattcatttgtagattatcatggttttctgcattaaaatgtttgtttcttgg

SEQ ID NO: 210 - DNA, 1463 bp, Rattus norvegicus
  misc_feature: Incyte ID No: 201585_Rn.1
aaaaaacccctgccctatccccctcttggggtcagagctcctggcatggagcccggccactagtgagattctgatgaacatgggtcccaccggaagtcatatgggcaggtgtggggaaccatcccctgggatcaggaatgatggcgtttctctctggtgccgtctcggtcagcttggcgtgacagagcaggttcttctccttggataagaaagtaacacctactgtgggattgttagtgctcactgaatgccgttcgcaagaagtgtgctacagagcgggaaaggaagtggtatgttattgccaggtagtctgatagagttaaacccacaattttgaattgctgctagaagttacagataatttctctgtcctagggccatcatgttatgggttttagagagtagcaacgagttgggtcttggctcctaagtgagacaccaagctcctgagtctcttagactctgggtatcactccctggggctggtggatattgcagtgtaacgtgcgggcctcgggcatctccagaggggtgcttggtaatatgaggaggtcctgtttattatccagtagtattttcttggtcattgctgtccttcctttaccctcagatccctacccagctgcagctgggattccaggaaggaggaggccattgtaaacctgggaagagcctcagagtattttggttgtggataaggtcactgccctagatagatcaaacagaaagctctgggtgaacagcattgtgccagacagaactaagaacagtgttaattcctcaagaagcagttgggaccaagacaatgtcccatccggaaggaagctccacctaggttggtgggaataacagcacatatcagaagccacgacatactctctggtcacgtactttgggacaggagcatgaaatgcttcctcatgacaccctacagaagtagaggtctttgggtctagtcattcctcttcccaaagcagggagactctggttcaacatagcacaaactcttagggaacagaatcaccaccaccgtgtagtctgataactttccttctgggtatgcgtgtgtgggcatgcgtgtgccctgtgtgtctgcgcagctcactaccaacagcctccatgtgcacttgaccttgtggtgcctctgggaactcgccaggctggcacctgaatgcggtagatatcagcagtctgaggctagcttgctctgcgcacaccttttgtttcttatttttggccctaggctggttaggaacctgtacaccttcactccttcattattaaatagtggcctttctcagtatttcctctcccctttgtaagttgctgaaatcacaagcacacttttggggatcatagaaggattggggttccagaaaggcatctatgtgatggttccattcactatggggatttccctactcgctgtcttctcgatttctctaataaaaagagccaaatgg

SEQ ID NO: 211 - DNA, 853 bp, Rattus norvegicus
  misc_feature: Incyte ID No: 202267_Rn.1
tggaaatcgttcttcagcctattctttggatctgtgggtttccaagtttctcctctttcagatttccttctgtttcagtgtttcctggggccagcacggaaagcagggaaatacggtctggcgaatttaggcccccattaagtttcttgaagaatgaagggattatcacatcgccctgtttataattatggagtaatttttctatttcggcattcacttgccaagacagcagatgtccatcatctccctagccttcttttgggaaagaggagaaaaaaggaggacgactgtgtaagccagaagaatgttccagaatgttttgctacccctggacatggtgcgtacaatggaaattaaatactctcccaagtaaagctggaatgacggcattcacttttctcctcgggcccaggctttggaaagggtttaacgagcaaatcccgaagatacaaattgttccatagatcctggatcagactctgtgtcttaccagacagcatgaagattcgacggatccgttagcccaagaaacctctgaagtgtcagggtctaaagctagctctctggagcacccagactgcctctcagttctgtgaaaagtaataagatcccactcttggaagcaaagccgttgatgctccccactaagggattcgaagtcgttcctagcatgtggggacagacagtgacactagagagggagacacctccttctgggtgtctaagatgagatttgagcttaaccggggaaaatgatggctcgccgaatgtgagcaaaatgaaatggccctgtgaggatatggcgcacgcctagtggtggtgattggtagctcagcccaccttgagaaatatt

SEQ ID NO: 212 - DNA, 858 bp, Rattus norvegicus
  misc_feature: Incyte ID No: 202892_Rn.1
cctctggccattagccttatcgtttgtttgtaattaagcttaattggtgacatcattgtttggagtgtgcatcttaatgcctgacctggtgacattatctcagcgctgtctctggctgttgtcctatcagtaggcttatgctgaatttgtctgttgcattattagaagtctttgcctgcctgattatcatctcattatatttagcagggccatctggaggcttcatctgctatgagacgataggagaagtctgggtggtcagctgtctccttgttacataggactgatgagtcactcacttggaaaacattgctgatgtctgccccttctccttggtggctttatgagaccacaacggccagctcacactgtaggggctctgtgtttccttctcttcatatattcctggctttccagctatgaagcccatgttctctttatacacatacacagaaacagatgcatgtatgttcttccagactgacatgtcttaacaaatggagcaaaagctcaagtagatatttctttaaaatgaactaaaatggtcagtcatgctagtacccaggaggcagaggcagctggatctccatgagtctgaggctagtgagttccaggatacagccaagctacatagtgagatcatgtcagccatgaccaaccagccaaccagcaaacaacctccccaaataaacaaaaagcttcaaaatcaactgaagtcaatccttcacagttttttttgtgtgttttaacacacatttttgcatacgttgtgtattttcatttgtgattgtgaattcttggaatgcttttacactcaacatttttgaaaattaaaacttatttactttgtgtgcgtgg

SEQ ID NO: 213 - DNA, 338 bp, Rattus norvegicus
  misc_feature: Incyte ID No: 202893_Rn.1
taaaagacctgaaatctaagcagacatcagaaagtgtcaacaaagcaaaaatgtgggctttgaaaggacagttgaggaaaagagcaagatgcaggaagtccccgctgtgagacatgtgtcagggaggctggcacagccgctctgatttcaggacagtggatccgtgctgtacatcgactgcgtctgccctgctgttaactcacttgtcagtgtctgcattgcagttacgcatttcatgtctgtaatcccgggaggcttgatcctgatgtcttttctgtaatcccggcttgatcctgtgtatagttcccattctatgtcagtcacaagttgccttaatt

SEQ ID NO: 214 - DNA, 463 bp, Rattus norvegicus
  misc_feature: Incyte ID No: 203071_Rn.1
ttatgtcctatatgtctggcatctttttgtgaaatgaaccattcagtaatttaagatacacttggttttgaaatatattagactcatattctgtgtatatatttaaagcagaaatgcatggaacacatcacattgccaaagccaggaaatacagaaaggatgggggctgctgggttgtacatagatgaaagatggtatgagaattttaccacttcattaataaggaacaagatgcaattatatgaaagatgttatgcctctggggtaaagaaagacacaacacagcatggccagttggacaatctctaatgctaactctgaagaccttctgtaatggagtgttgaaaaccaatgtgtggtcagaaaagacagtgctacaaaggattggggctgaaattatgtagatattcatgcatcacaaaacaacatggctgagtgaagcagaagtcctgcaatgttgtca

SEQ ID NO: 215 - DNA, 890 bp, Rattus norvegicus
  misc_feature: Incyte ID No: 203342_Rn.1
agactgtccaccatggttgtgcctattctctgcctcctatgggccatagcaacagcagtgcgacctgccccagtggcccctctcggtggtccagaagccggcccaatatgaagagtttgacctggctctttcacggggccctacagctaggtcaggccctcaatggtgtgtacaaagccacggaagctcggcctgacagaagcgtgggcgcaaccgtgggcctttttgaccaagcactggaatttctgggaagagaggtcaatcagggccgggatgcaacacgggagcttcgcaccagcttgtcggagattcatggcagaagacggacactttttacaaccctttccgaagccaagaaaaagcccacaaggccctgattcgctgagcggaagtggcccgggcccagcatgctctgcggaacagtgtacggagactacaagtgcagctgagaggtgcctggctaggccaagcccaccaagaatttgagaatttaaaggatcgagccgataagcagaaccacctcttgtgggctctcactggccacgtgcagcgacagcagcgtgagatggcagagcagcaacagtggctgcggcagatccagcagagactccacatggcagccctcccagcctgagactacctggaagccacttaaggaccagttgcgctgcagggaacactgaatgcgctccaccgggcctatctatgagcagggccgacagagctggctgcccatcagctagacttggccggtgcaccccgcttcctggcagagcagagacagaagcaagcaggcgggatggaaggcagaagacagccccgtggagaaggctggagaaggacatgagctcccttatgccccacaccctacaataaaaaagaggcaatct

SEQ ID NO: 216 - DNA, 1568 bp, Rattus norvegicus
  misc_feature: Incyte ID No: 203410_Rn.1
ccaaatagtaaatgaaatttagatatttcataaaattatgaacagatagcgcgatggaggccagatcttcgctgtgtgactgcctgttgaaggtggtgcctgatcacaggcggggagaggacagccttggcttacccgccatggtctccaccatcatctggagtgggtaaagtgtcatgatcacgttgtcaacttcatttgcagttaccggtttcagcaggctttgcttttatactgttgtggaatttcatctctctgtgtagcaccttccttttttcactgtagatataagaagtgacttttgcctcatgagggaattaaggacatctctcatgtagaccctgtgctgggggtgtgactctgatgcttttgaacatacgctagagggacggttctgaacaggatgcagggcaaaatcagcagcttaaggctctagattctgtgagatgctacccatctgatctggaagcaatgagggaacctaggaaaaactctgaggggctcttgtgttttcttcagaaataacagagcaaacccaggtggcctggcaacaggcaagtgctagtgtgggggcagcagcggctgtgaggaccatgaacaggacttttatatatagcatttgcttgtcttgctgctgtgtgtgaggttgaattttcctgatgttaactttgtattgtacccgtggagtggatgagacggtctgcagacaggagggtgtcttgattctgatttcctggtaatgcaccgtgtgagtacgttcgtaagtgcgaaattatgctgctgctgtttgctgtcagactcatgtccagcgtgagggtagagaaggtaggagcacaccggggtagtgacttatcacgttttgagtttggagcactgagttcatgggacagtgttcgtgttacactgccaggtcctcctatgcagaggctcgtgtggggtgtctgtctgcactactgcatgttgttgccttctaccgtacggacagctggtaatgagaactgttcagtgtcggatggggccttttgttagaagcccttgtagtgatgctgggtaggtatgggtgtgcccttctattgccttggcttatagtactgtctcactatgtctgtccatggcacatggtacaggtgtgtatggcctctggtgttgggttcctcattatgtactttactccgtttgtccctaaattgactacggaaacaacactagaagaactggaatggaaccactgtacccagggtggactactattagatgaaagatggttataattactaagaccaactaggagaaagagaatggctgaaaagtggcaaccagtcatgcttcatgctgacacagagcaaccatcttccataaacctggaccaagaaggatatgacagacagtgagtgcaaacttccacctagaagggaccaagggaccattgaaccaggggctaccaatgaacatgagacattcattctgtttatacagagtgcacgtgtcctgtttcagcaaacgtaaaactgtcatttacaaaagaaggtcagtctgtatcctaagcattttaataaaaagctaaaatg

SEQ ID NO: 217 - DNA, 384 bp, Rattus norvegicus
  misc_feature: Incyte ID No: 203766_Rn.1
ctgaagagaaatgatgcaccctctttttgctgccttgacaaagctgtggtagatgaacctcccgatcccgtagcctactaccaaaactgacggacaatggactgagcccattaaatatttgtgaagtgttggctcgctgaagaggcattgtgtcacacatgatagatcttactaaatatgtctgataatgaatgaaggaaaacaagttaaattaattactttttagagtaaacttggaacacaaaacagtctggtccattttcactgtcaagtctaatcagctctgattcttcaaagaaacaataaattgttcagcagtatggcatatcccttgagttgtccatcattctccttttcctcattctcttggaagtacagctttta

SEQ ID NO: 218 - DNA, 627 bp, Rattus norvegicus
  misc_feature: Incyte ID No: 203948_Rn.1
atttaaggtattaattcaaatctctttccaggcttttctaaaggcctagctaatgagtttttcagttccctgctctctggcaataaagtaggtttatttaaatctgtttcctgagagtcttctgtagtaggtgggcgttcatgagcatcatagtcagggctctggtaagagtggatcctgctcccagtgttgacaacactgctggggtctagtcctttagggttctccagacagtcctgaactgttagtccagggagttgtcgatagcccagtgaagtgaaacgaccttgtagccctgttgttatcaagatccacatcaggaaacctgaatggggccagcagaacagctcataaggtataggatgcttacctctgaatgcccacgaccctgtctccagttccagcaccaccaatataactaaacaagcttcagaggaactttcctgaggtctttgtggtttgaagtaggtgttgaattaaccatggtaattcaacttgaattcattagacgctgttgtgctcgaagcagcatctattcaaggttctattgagtcaagtcaggtgtagggaactatgccttcatctcctcctattctggaagctgaggcaggaggaatgcatgtacac

SEQ ID NO: 219 - DNA, 355 bp, Rattus norvegicus
  misc_feature: Incyte ID No: 204269_Rn.1
ctggaaggtagccactctaactaggggcgtgctgagacaagaccacctcattcctctgctgcttttcagacaggactgtcctgccgacccaccatgatccaggctgcactgttccttggctgtatcttactgtcctcggtgaccgcctttccatggaagactcaggatggtggcctgccccatcagccagctggcacagaaactgagcctacacaactgctctacagcaatagtcctcctccgacctccagtacctgtcggaacctcctaagcatggcgcccctgccccctgtagctcctctgtctgagtccttgtccctcttagcactgagagttgtcctggaaaacatcggct

SEQ ID NO: 220 - DNA, 590 bp, Rattus norvegicus
  misc_feature: Incyte ID No: 204724_Rn.1
cgatcgtggtactcaataaagttgcgcgctgtgaatctcgcgagagttggcttagcgggctaaggcttgagatcgcacaaacgccgtaaagtctgctaggctggctatggtacggccatggccaagccggtttttcgaagcctacaatgagacccccgacggcacccagtgtcatcgcaagggcctacatgcactactgccttaggcggcctttgtggcctaataagcttctgcttacagcatcacacacaaccctgcagattctcccctgggaagccgtggccagggtcggccggttcacattctcctgcagctgctattggagctatgttttggccttaccacctgtgtcagtgcccagggtccgagagaagccagatgaccccctgaactacttcattggaggttgtgcgggaggcctgacactgggtaatactaactcacagctacgggaccgccgccattggctgtgtctacatgggtaccgcggccgccctgttcaagatgggcaagctggagggctgggagctgtttgccacccccaaggtgtgagccaacctgtagcaaataaatgctggatgtccctcctg

SEQ ID NO: 221 - DNA, 615 bp, Rattus norvegicus
  misc_feature: Incyte ID No: 204886_Rn.1
taccttaaatctaaaatggaggggtagggatagcaagtgggagtggatagtttttttactttctaagttttcttgatcttatggttatgtttatagccagtgtatttatcacgagtaaacacaacccaaaatcataggtgtgagtgtatgtgtctgtgggtaacctctggaaagggcaagccctgcgcttcctacttctgtcaaggcattcggcccagttggaaaaacactgtcacaggcttaagttcagtatggcagctgtggaagaagtcactttccatgaaaggccatttttactgttctctaacgtatctctaatgtaagccttacacttactatcttatcttgcattgcacagagatctgtcttactgcacggcagtgcactcagaaatcagagatttttacccacctaagcttttgtgaatgaggatgtcctcttcactctctttaccactttatctttgttttatatttgatttggtctcttaattacctggtcctttatacaaacttgtacatagagttgctcgaaagttaagcttaaccatcctatgagttaagagaattatatgtctggagttgttcctaagatgtgaattgtggtcaagggtta

SEQ ID NO: 222 - DNA, 1105 bp, Rattus norvegicus
  misc_feature: Incyte ID No: 204985_Rn.1
ggacggatccagcggttagagtgtcaaatcgacagtgccgtgacttccttccacactgctctggaactgcactgtagaccagagagagatccagcatgagtgtctgtatgaaatcggctggtgcagcatgattgaactcaacttcaaggatgcatttgattcctttgagaggctgaagaacgagtccagatggtcccagtgctactacgcatatctaacagcagtttgtcaaggagccactgctgacgtagatggggcacagctcatttttaaagaagtccagaagctattcaaaaggaaaaataaccagattgaacagttctcagtgaaaaaggctgagcgatttcggaagcagacaccaaccagggcactgtgtgtgctggcatccattgctcgtatgattgtgtggaaagcccttcccaactgttccctccccaacctgcagagaatgagtcaagcttgccatgaagtggatgattcatctgttgttggattgaagcatttgctccttggtgcctcacacaaatgtctcggaaactcacaagatgctgttcagttcttccagcgagctgctaaagacgagtcgtgccgtcagaataactcatacgtccagccatatgcctgctatgagcttggctgtctcctgctagacagagcagagactgtagcaagaggcagaacgctactccttcaggcaaaggaggatttttctggctacgactttgaaaacagactgcacgtccgtgtccatgctgctctggcctctctaagggaaactggtccctcagtgataaactccgagagacgcctgtcccctccacccagagtcagcacctgtgaaggacagaaggagaaagctcatatagaccatccagcttttcttatggagatcactgtgacaagggatgtgtcctggtgtcacatggcatacatgaagatcatcttattattaagacggtgtagtgacggagtaataaagatgacacaaaatgataacaagaagtggcctgggagggggttaagtgaccttgtgcaaacactgtagttctgtgatttattatttttaaataaaatcaaactaactattcaaaaaaaaaggaaaaaa

SEQ ID NO: 223 - DNA, 1408 bp, Rattus norvegicus
  misc_feature: Incyte ID No: 205092_Rn.1
gtcggcgctttggggagcttgtcgaagaatggcggcgctgtgtgtgtgtcggtttgcaagaagaggctggctgtggaagcctcccttggctacacgtagagaattctggtctagatccaggaaggagaaggagctggtggtggccgagacagtggaagaagtgaaaaaagcacctgctttggtgtgtccacccttacggaagccgagcatacacaccacccagtggatctccagagtcgcttggaatctcatattaaagaagttcttggttcatctcttcctaataattggcaagatatctccctggatgatggacatgtgaagttcagactcttagcaaatttagctgatgacttaggccatgcagtacctaactccaggcttcaccaaatgtgcagggtcagagatgttcttgatttctataatgttcctgttcaagacagatctaaatttgatgaactcattgctagtaatttacctcccaatttgaaaatcagttggaattactgagcagtccagtcagaaccacagtgagatcattctcattcttctcattgggtgactgacagcgaactttgtgagatgttacctattagaacttgtttcagaacttcctttttttttttcttttctccttgtagaagaacacatttttttttctctcatggagcatcaacaaagaaaacattatcacatttgctaaagctatttatccccgtatgaaatcaagtcttgataatttcatgaaaacattcttattccatggtacatagtgacagggttgtttgagaggaacagaagtggtagtcatggaagcctatttaaatgggatttattatgatagcttacattaaggatctgggtagtaccatcaatgaactgtctcacaccagagaggccaagaacctcaggcacatacttgtacccttcatgaggcggacagttctcggtagtagcaagccgctgactgaaggcctcggggagtctatctgaagagcttactggtcgttcagtccatgctggctccctgaagaagctgttgcatgatacaaacgaagagagtgcacgcaatggcaggaaccgagatacatgtactttgaccaggaacagagaaggcaagcaggcagaaagcatggttcttgcgccacagttgtacatgtacacttccgctcatgagagataatcccgccagtggaatggccagctgcttgtctttatagttgactccagatacagtcaaggtgacaaccaagaataaccatcaacaggaaaatgctaagtaaacttgggtttcagataagaggccattgcaagttcaaatgttttctttgcccttcatatggctaaagtagtttcaataaaatgttctaatcttattaaggctcaaagatatgggatgatatatata

SEQ ID NO: 224 - DNA, 419 bp, Rattus norvegicus
  misc_feature: Incyte ID No: 205446_Rn.1
acaaaacaaaacaaaaaggtctgtgttattgaggtaaaacacacagacaatcagccaacaggtgagaaacgaaaaagtgacaggcataacctggagataaaccagatgagggacctaattttttgaggtagaaaatgtacggctttgacatttaggaaaggacattcttcttatctacaaaaggaaatcatgaggagtgaagggaagcctaggataagcatgcaggtgtgttagataaacacgagaaggcacaagatagaagcaacgagaaaggaaagcaggaagcacctgataccaccatgcccatccagttcgactaagaaatgttagactaccttggaatagacagagaaactgtacagctgttctactcagagattcttagactgatttctcatgagtgtgaacctggcccctgg

SEQ ID NO: 225 - DNA, 1292 bp, Rattus norvegicus
  misc_feature: Incyte ID No: 205717_Rn.1
  unsure 792-813: a, t, c, g, or other
gcgcacaatgatacatgtgaggcaaaccaatatgtgtgttattacaaagaatccttcatcatgtgtcctttcgaatgctttctgtagcaaaatatcctttcacctgtgtctgctttagcaaaacaccgtccaacacaactgactttccaaagaaccttaagtttccattccacaggacactgtcaaagccaggactgctaacgtcccattagacatcgcactgtttttaaagctgtcttctttttcctgcccacagaattagagctacagcattcctcagtgtttgtcatagacatgtattaaccaggtagaacaagccaggaggttttagactattaagtttactctccagcttcatgttactgagtttcctttaaaagcaagcttttaacacaacttctggttagtagagattttcatgacatgagtagaatcagtgagctgcaaaaaaaaagtgtaaaggtgaattgttaaaaataaccccttgggctagctctgctctaggcactattgttacattacccaggggttaagattacgttttaaaatgtgcctttctatgagttagaaaacacactatatggcaaactatataattaattcatagacaaagtcttctcaagccagatgtactatctctcaggttcatgggtttgttccctgtcacatgcaggttagcctatgctcactccggtaaagctaaaacggtgatggctgtaggtgttactcgactctaacttttttagggctttttgtcaccagtaagctcccacagactggtcagttttttgnnnnnnnnnnnnnnnnnnnnnntaattaagttgtcaagcacacagtgagggaggtcagcaatgaaaagcgcaccaggcatggttgggtagagattcttattagtcctgtcgatcaccagcttaagttctgtgtaaccacagacatgcaaatgcatgttacgtaacgtaagaaacatagggacggtatcgagtacaaaggggatggctaacacaggtcgatttgtgtaatataacagtagccaacctctagcctggctagtgtgacagtaggcattccctgtggccccttatgcatttgctctctctgtactcaacgtgagtcctgttctctcaactctgccccacccacccatgcagcttcacatgggaagcgttgcccgtgttagcgctgtagtaagttgcattgtgctgagtataaccaaagctatcatttttatgttgaccctgtcataaatgtcttactatatcagctctaatcctttttaaataaatttgagaaag

SEQ ID NO: 226 - DNA, 1279 bp, Rattus norvegicus
  misc_feature: Incyte ID No: 205955_Rn.1
gggaaactcatcacacaaggagagagacaactccacgtttgaaaattagctcccctcaagcctagtccatgcacggtctccaccttttctgcacaggatccgtggttgtgacccggctctggctgtcgcttgctgagagcattggtgttgctcctggcaggcctgaggcgtcaaccagatgtccatggccacgagagtcagtgagcgcacaggggatctgctgctgcccttcctggcaggagtctcctcttgtttctatgcagccatagtttgaggacaaccaggccaacaacctcaggacaagttcagggaaggaaagacagtggactgcatgggaccctggtgtggctctagaacgttgagagtggtggctgtgggtgggaggcagctctcagcttgggtctgaacggggctggttagaaaccactcaggggggcggggcggggcgattctgggagtctctggaaagccttggtcaggtttaagtgccacaccttgcgtgcatctgtcccagatcgtggcttggccggagctgtccacgtctgactgctgagtggtttagcccaggtgactttcccttgtgtaggtgagcaaggtctgcttcccagatgaacaggtctgccagtataatgtcgtgatccaagatatgcgaataggtaatcatgttcttccctccctgcactccagtctgcactccctgcatgaggggtacccagtgcagaagctccagccttaattcttgcttcaggaccctagatcctagcccctcactctgagggcaaccctgggtacggtgcaggtctgcctagcgtttaccactgtctgtttaagccacagctctctggccccatcatggccgtcctcggtgaggcgaccgtgtacccttcttaggccctacaggtccctcagtagcacatagcgaagaggaggtgactggggaaccatgtgacccaagggaccgcagaccaaggttcacgcctgactgagagaggagcctgggacaggggaggaagggacattgttccatacagtatatgattatgatgaaagatatatgatataaatgataaggagaaagaatgaaaattaataagtatcattaaagaggaaaataattaattataaaccatatagtgatcatagattgacttacacacatagcctagagctcagttttagtttaacattgtggaaatattaaaagaatcttgtaactttattcttttttttctcctgctgaaacaaattaaaccaatcgtatggacatttgaattgtctg

SEQ ID NO: 227 - DNA, 712 bp, Rattus norvegicus
  misc_feature: Incyte ID No: 206032_Rn.1
ataattcaaaggctggggtgaggtggttattaatgtagggtacgaggtgagggcagccggctgagcgatattgaacatggcgctaggtatagtagggtttgtaggcggagtgcccatggatgtgggaggtgatgggaggcaaagttggcctctaggtctgtgactgatggcaacagtatccctcactgagaccgcacagtgcctctggcagagtcagattcacacagaacattctaactatgtgggtgagatactgtggaatggactgcattgcccaggtatgaggcgtgagcctctttgagggatgagaggatctagaagctccctgaggatcggtagtagtgcccttatgttactgagggggtgatctcaccccagcaaagttgagggggttggtggcccctgtcctggagaagagggggatggattcattacccaagggatcctttggaagcctttcctcagcttgtgcctcctgaaactcacgaggtggtgtttcttttgtgagacactgagatcagatgatggtatggtccagcgcactgctgtctgatccccggcggtcacctgacctttcaacctcactcctcctctgtaccatatggagagcgaaaaatctctcccctaacggctggagaataaccggggcgtgttctcttgcctgcatctccccagcgttgacatcctgctatagctaagctacaggaacaag

SEQ ID NO: 228 - DNA, 1570 bp, Rattus norvegicus
  misc_feature: Incyte ID No: 206097_Rn.2
ggcccagacaggacaagaaagtcacttggatggaaggaaagagccatagtggggtacaacccatttggggatcagacaggccagcagtggcatgccctctgtggggtgttctgcagtacctgtggtatctctttgtccaaatgtgcaggcagcctctatcccagattaccggggtcctaatggagtgtggacactgctccagaaaggaaggcctgtgagtgctgccgacctaagcgaagcagagcctaccctcacccacatgagcatcacccagctgcacaagcataagctggtgcaacacgtggtgtctcagaactgcgacgggctccacctgcgcagtgggctgccacggaccgccatctctgagctccatgggaatatgtatattgaagtctgcacctcctgcatccctaacagagagtacgtccgagtgtttgacgtgacggagcgtaccgcccttcaccggacacctggacaggccggacgtgccacaatgtgtgggactcagcttcgggatcaccagttgtgcactttggggatgatgggggatcgtctagggtcagctccctgaagctgggaggcatgcgatctgaggccgctagcaatagcagacacaatcctgtgtttgagggtccagcttgaaggtactgaagaagtacccccgtgctgctggtgcagtgactgaagccctccaagccgtcggcccaaagctctacattgtgaactctgcagtggaccctcgaaggatgactgggctgcctctgaagcttcagtgggaaatgtgatgatgtaatgcggctcctcatggacgaactgggcctggagatccctgtctacaaccggtggcagtacccaatcttctccttggcaactccactccgtgcttggcgaagtaaggtagccacagttaggaagtcactgtgcaggagcagagaagagcccccactccggggaccagagtgcccctcttgcctcagccacccccatccttaggaaggctggttcggtcaggggctgtgctatagcgtgcttaataaggtaagataagcgggcgtagtccccggtgttgactaagagtcatgtcggctaccttgctagtatggctttgaccccatgtttatgggtctctgtgtcatcagtgaaggctagatgtgcccccatccagatctagtggaaagaactctggggttgggggtgacacttcctggtgacggtcgtttttagccatctgtccttgtggaaagcctcactttgtcatctgctgtgatcgcctccactatcgggcttgatcttacaaggacactctccatcctatccccccctatacaaaggtggcagcaaggcctttgcaagaagagctcccgtctttctccaggcctggcctcacagaggtagtccaccactgccttacctcactctccaggctaggtctcagggcctccctctttctactacttactacttattatgtgttcactttatagtaacctttttctgtattgggtatgcggcacagggaggatctaagcctccagtctgagcaagtcttattaaacatctctctattgcc

SEQ ID NO: 229 - DNA, 233 bp, Rattus norvegicus
  misc_feature: Incyte ID No: 206263_Rn.1
agagtaaggaaataatttaataaaaaatgaaatacagtaaacacaaacaagcagggaaacatgacatgtacaaaggggcacagctcttcactaactgaatcctaggatatgcaaattgtcataatgctggacaaataatagtgtatgtagtcttggaaatgactagtgatctcacagaggatttacgcctgcagagaaagatctgagtgctatctattcagaacaagacaata

SEQ ID NO: 230 - DNA, 703 bp, Rattus norvegicus
  misc_feature: Incyte ID No: 206840_Rn.1
tgcgatctagaacggcagcaaaaagatactagatttgtgccttggagctgagacagcagagtgggtggtcaaggcaatcacaagacccctgaggaccgtaatctgataagtggagccggtgttggaagtaaagaaagagcggtaaagtttctgctgtgccaagctttgtggacagcttttccgatgacgatctgtcctcggattgctcagagtccggagggaaagccacactccacctgatggtgctctaagtcagtgtgctatgtggtgacccggttataagagctaagatgcagggaaacttgttgggagtgttcagcagagtacaaagaaagtggatgctcttaggaaatgggaccttaggaagggacccgtgttgagatggaattcctagaagggtccctaagtccctggggaagaagcaggcagagtcagaaagctattctggggactccacagtactcaacacctcttctgctttcacagacgagacagactacggctctgcagccttggcatggggcagaaagcaagactgatgacagtgcggtaagagcatctgggaccttctctccctgatccagcctctcctatgcccaagcggggcggcttatctctctctctttccacagctgctgatgctgaagcgaaggaagcgagacaccaacttccccatatgcctcttctgctgtaaatgctgtaa

SEQ ID NO: 231 - DNA, 472 bp, Rattus norvegicus
  misc_feature: Incyte ID No: 206844_Rn.1
atgagccttgtcttccctaacctgcttccttgtatatctgtaacgtgagctaggcttatagagtcagggagggacaagaaacgggtggctttacactctggtttggtcctggcatccggatccctgtgaaatatccaacactggaagcctaggcaggctggccccacatcagagttgaaccggccaccctctgatgctaagacatggggcgcaggggtgggggtggggtccctctccatggttcagtctacaccactcccctgttctcagcttacctctctcactgctttgtggttcttcctggatctgagtgcctgtttcttgacattcctgtttatctcccaaccggctctctgaggtgcctggggcctcagccacctgtctgctgcattggtggctcataggatgtgaacttgaagatgcctcggaacaaccagttgttgcacttcgccttccgggaagacaagcagtg

SEQ ID NO: 232 - DNA, 2797 bp, Rattus norvegicus
  misc_feature: Incyte ID No: 207047_Rn.1
agcgtcccggcttctcccgcgcagcgggcagctgacaggcggacagactctcgggtggtcacactcacgataaaagctggcaggctgacagaggcaacctcaggacggactttctggctactgaccattttgctgtgtcttactaggattgtgtgtggacgtgagatcaaccatgagctccgttgcagttttgacccaagagagttttgctgaacatcgaagtgggctggttccacaaaaaatcagagtagccacattaaattcagaagaggaaagtgaccctccaacctacaaggatgccttccctccactgcctgagaaagcagcttgcttggaaagtgcccaagaacctgctggagcctggagtaacaagatccggcccatcaaggcctctgtcatcactcaggtgtttcatgtacccctggaggagagaaaatataaggacatgaaccagtttggagaaaggtgaacaagcgtaaatctgccttgagatcatgcaaaggatctggtcgctcacctggagctctctctggctaaagtaccaaggtctctccatcatggtctccagggaagctggatgcagtcatgaaagcccggaaagacattgttgctagactacagacacaggcctcagtccactgttcccattcctaaagagcaccaccgctttgttattggcaaaaagcggagataataactacaagacttagaactgaaaactgctaaccagtaatccagatcccacagcacagatgaccccagtaatcagatcaagatcactggcaccaaagtaaggcatcgagaaagctcgccatgaggtccttctgatctctgctgagcaggacaagcgtgccgtagagaggctagaagtggagaaggccttccaccccttcatcgctgggccgtacaatagacttcgtgcggtgaaatcatgcaggagacagggacgcgaatcaacatccctccacccagtggttaaccgtacagaaatcgtcttcactggagagaaggaacagctggctcaggctgtggctcgtattaagaagatttatgagggaaagaagaagaagactacgaccattgcggtagaggtgaagaaatctcagcacaagtatgtcatcgggccgaagggcaactcactgcaagagatcctggaaagaactggagtctccgttgagatcccgccctcagacagcatctccgagactgtgatacttagaggcgagcctgaaaagctgggacaggcattgactgaagtctatgccaaggccaacagttttacagtctcctcagtctctgccccttcctggcttcaccgtttcatcattggtgatggggagggggctcgaccctaagtaacagctcaactttcccacaaccttttgcctctgcctgccttgcccagacaccttgtgttcattgccttctttctacctcagccagtgtggtagtactctcacgtgggttagtgccaccccaaggctcttctcttgatgtagacatttccggtgattctaggcttgccattgagttgagagtggaggccagtgctttccctcaggccacatgattcagggaactgggccagagctgggtgctcattcccagccagcctgaccatgtaggctctggcaggcatagcctggatgcttatgcagtcctgaggaacagactgaaggggcaggtctcatcaatagaggtggtcatttagcgtggattaaaaaggaagaatgaaaacggaagaccccgatcagggagcactgctagctgcaggagaacttttcctcaggtacaagagttaatttttggaccactggcctctagctatcttggctgcaggccaacctcaccgagaagtggtcccaagttcagaagactcctgttaggctgaggaaactgaggacagatcttttatctccaggtcatctgataactagcaacatgtccagtcccagattcttgggttactagaaaagccagcctgtgcccatctcatggccttccctgagaactgtcacttctactatgacaccttttcccccaggtctttcactcccctatttaataactcaggcttggctacctgtcccctctaatcctcagtggatccagaatggctttcccaagtctagcttctgtcccctgtagatgacagtcccacattgtaccccttagaggtagcggttcgcaagatggggaaaggtaacacctacttgctcagtaggctggcagctggtatgcatgttggtgttgagtcggggaggagggctcctgcctttacctgcagctggctcttctctgcatctgcatgagattggggacaccttgcttccctcctgcccctccagccccctcttcatcttcattgtcatcctacaacatccagtctctcccttcaccagaaggtaaagctttaaattctcaccacaggatcttgcacatctccttttatgtgctaagtctgtagatgttagccctagtcgctaagctgttcagggtcgtcagctcctgtttctctgattgttaataaggaactaatgaaattgagctgtacccaggtcacctctctgcagcctccaagagcacttgaggagccctagggcaggggtggggagtgtcttttcctcccttgttgaatgtcattccatgtcctgtgtttccatagctacatccgtcccttggccttaatctttggaatttggagattatatgcaaacatgcgtccaaggcgtcatgaatatggatgacactggaattttataaattctaaaataaaacccgaaaccagacgcagtgc

SEQ ID NO: 233 - DNA, 1022 bp, Rattus norvegicus
  misc_feature: Incyte ID No: 207354_Rn.3
  unsure 772-845: a, t, c, g, or other
gtatggcgctgcaagatgtgcgaccgagacggtggagctccacatgctgaagagcacttcttcaaactatttggaggtcacagatatctttgagactctgatgaaagcttgctgaactaaagcaagaatgccttgctcgcggtttagagaccaagggaataaaacaagatcttatcaataggctaccaggcatatcttgaagaacatgctgaagaagaagcaaatgaagaagatgtactgggagatgaaactgaggaagaagaaccaaagcctatagaactgcctgttaaagaggaagaacctcctgaaaaagttgttgatatggcatcagaaaagaaggtggtaaaaattacatctggaatacctcaaactgagagaatgcagaagagggctgaacgtttcaatgtgcctgtaagcttggagagtaagaaggctgctcgcggcagcgaggtttggaatttcttcagttccaacaaaaggtttatcatctgacaccaagccaatggttaacctggataaactaaaggaaagagcacagagatttggtttgaatgtctcttccatctctagaaagtctgaggatgatgagaagctgaagaaacggaaggagagatttggaattgtgacaagttcagctggaactggaaccacagaggatacagaggcaaagaaaagaaaaagagcagagcgttttgggattgcataatgaaaagttcgtgctttctgcccaccccatagtggtttccatttctcagattttcttggttttatnnnnnnnnnnnnnnnnnnnnnnnnnnnnnnnnnnnnnnnnnnnnnnnnnnnnnnnnnnnnnnnnnnnnnnnnnnttccctacctatctgcctacatacacagtcatgtgcctcacagtgaggaagcatgtacgtttggtacatccttgaatttcgtagcagttttatttaactgctcttctgcatttaagattgttgtggtttttgtttttaattatttttgcttattaataaaagaggaagaaaagaaat

SEQ ID NO: 234 - DNA, 831 bp, Rattus norvegicus
  misc_feature: Incyte ID No: 207525_Rn.1
ctcagcgaccgagctcttgctggggtcgcttgctgctgacgtgtgccgaccggcttcgggccgcggcgcgggtcgctatggcggtggacatctcactgctcttcagggctagcgtcaagacagtgaagacgcggaataaggctcttggagtggccgtgggtggtggagccgatggcagccgggacgagctgttccgcagaagccctcggcacaagggagcacttttccagccgggcccgttaagtgatttctcatattgggaagctgagagattttctcctggaacacaggaaggagtacattaatgcctacagccacaccatgtctgaacatgggaggatgacagacacagagcgagaccagatagaccaggatgctcagatattcatgcggacctgtaaagacgcaattcagcaactcagaacagaagcccacaaggagattcattcccagcaagtgaaggaacacaggactgcagttctgggatttcgttgaagattacttaaaaagagtgtgtacagctttactctgaacagagagccatccgagtgaaacgcgtggtggataagaaaagactatctaagctggagcctgagcctcatacaaagaggaaagaacccgcatctgagaaatcctctcacaatgcttcccaggactctgaagaaaagcctgctgctgaggacttgccagaaaagcctttggctgaatcacagcccgaattgggaacctggggcgatggcaacggtgaagatgagctgtctccagaagagatacagatgtttgaacaagaaaatcaacgactcattggtgaaatgaacagcttgtttgacg

SEQ ID NO: 235 - DNA, 955 bp, Rattus norvegicus
  misc_feature: Incyte ID No: 207676_Rn.1
ccacctggtcccagttctgtccccacctgccgcagctccaaccaccagcacgtcttcatcacatgcccttaattattctatcctcatgacagccctggtgtcgtcagaataaggaaactgaggcacagagacgcttcggcatccagtaaggtcacagcacacaagctgcccggctccacaggctggggccgctgtcccgctctgtcccggccatcgagggctgcaagggtagatgacatctgcttcccttcccttgctcaccctccgtctgcctgcacatcaccctcctccttcacaaacgagcgtcgaatgaacaaatggatggatttgttatcgctctctgtcaagtacttccgtgcctcattgaatctgagccgagcacccttgaaggcccttccagcatcttctctcccagcagagcagtctgcttgtgccttctaaggaggtctcgtgccaggtatggacaggctggtgaatgatggaggtctacttgtctgtatactccacaaagacttttttttttttacaatgaggctgaggtctctgtggataattccagccccagggccagcacctatggcgtacctacagctgtgtgcctgtctacctgcccactcgaggccaggtgcacggaggggcggagaagctggcctctccaccagctgctccacgcccctcagtgctctggttttcctggaatcgagggtacctcctggcatcctgcacctcaggtctcaagcggcttcctgctttgtttctaaaggtccccagtgggtgtgtcacatacctggtatcacaaaatgtcagcagagcggatgtcccagggtcactacaggggtcagggtcagagcttctagtgagcttgggtttcaacactactccatctctctacaataaactccccgtggcaggggatgtggcagcaatcgtctcagaagctgccactcttgtctca

SEQ ID NO: 236 - DNA, 489 bp, Rattus norvegicus
  misc_feature: Incyte ID No: 208217_Rn.2
gccgccagtctcgagatgaaagccatgctgtggatgagatgtttcccgagggcgcgcgcggcccttattgctacgactttggaatgaggctgagagcgtagcacccgggctcctgaatggaacgttggacaagccaaatgaaaaggcagtatcatgcggactattgttaacgaatacgtgacagatctcgtgtgtatgatgatgaatgtccagtagaggacgcgtctgggtcatatatgactgctaatgtctcgtgatgtgtctggagtctccggggaacaggattcacctgatggtagacactgtgtgactatcagtatgctatcaagacttagtcagccaataggggaactgcctgaaccaactgggtactgatgcctctgggaacgccagccccactgtccttgtctaaattaataacagagcactagaacacacagggtggtcttaattcctgtgcttttagatgcagatggacccccccccccc

SEQ ID NO: 237 - DNA, 1010 bp, Rattus norvegicus
  misc_feature: Incyte ID No: 208871_Rn.1
tcagcagagagcgttagatctcgctaagaatgggattacagacagtcgtgagccacctgtgagtcatggaaccgaactttgagtcctctgtgagagcagcagtgttcttaaccttggtgccatttctccccctctgtattatttgtggtgtcatatttctttgatgtctcaagttttgctatgagtttttttatttcctttacaatttgatctgagattgttctttgaggttggagttaaattcttccgaagagaacaattgaaggcctctgccagctccctgggacatcacctagacctcttggggctaagttctccactaagagtccaaaccagacagttcagagagcacaatcatctaagacctggtttgtgatttcaagtctcagggagagtcctcgcttaaagagtaagatggcgctgggcatgggcttcgtggctgttcttgactcctgaactctatgttcctcatttatctggccatttcaagaggagctgtttcaagactcagggttatcagaggagtctgtgtgggttcatcttggctttatgtcttagttggtgtcctgtattattgacggaggaagcctttaagcttaggtggtttggtagcctgactgcctttgtgccaacctcacagcctttttttggattgtgctggaggaccgttgtgttcttccattaggggaggtaattctgaagacttgagtttaatatgaagatgccatagttctcagaggttgggtatacagctaaagtgatttcccatctcctttgcctaggcggatcccagtttcagtggttatccgaatcataagtctcccatgccctctaaaagtttgtccagagtagataacagtgttccggtttccagcacctgaatgaacaaagttaagtagatatcaaactgttgacttaaggaagatgctccttccccgactctgcagattggatacattgcgaacagttcacaattagtggctagttttcaaagctagcttttgaactgt

SEQ ID NO: 238 - DNA, 1069 bp, Rattus norvegicus
  misc_feature: Incyte ID No: 209012_Rn.1
gtcgctcctgcagactccccccaggcagggcaaacagtgcctccagtccaggtgtcagacatggacatgaagaaggtcaactccttggacttcactgaatttgtgagtgtgtttaggaacgtcgttgaaagatgtcctctggtcgcagctggccgccgggtcccaccgtcctttctctggcttggaagacttagaaaatcacttttttgcttttatcgatgctctcccaaaagtcaggccaggagggcatcctacgctgtcacccggacctagcgggccgcgatgtgcttattgggcaggctctccgaggagtcacggcgcgatgcagagccatgctggcctcaccagcctaaagacccatcgaccggctgcggctactgcacctcaaccaggagtaccgcaagcgcttcggcttccccgttcgtggtggcggcactcctaagcgaccgtgccacggtgttccaggagtctagcccgcaggctgcactgccagccggagtccgagctgcgcaccgccctggacgaagtgaagaagatcatccacctgcgcctgatagatttgcttgacagccattactttggagtggaaccaccgcaaggccggggattggaacgccggcaggatgcttcagagaggggagactctgcgccccaggctagctcggacctggaagacgatccacatacccacacaaaggaagtggagaattgaagcaatctacacgggtaatgcatctttcgtacacctacttcaacaagagcacgcgatcgcccacatcttgtcagaatctggagcgtttagcgctttgccgccccccccccctattcccctgcgattgtatccagatcgttgcttcagttctccactccgtgccctgccagacactagccttggaagattccaaagctcccaccgagttactcgactcttttccgtttactaggagagagttgggggaactggcagtgactgtaaaaggcactgaaaggcggggacggggactttcgttccactgtggtctttcatttcccacttcatttgattcacctaatagttacatgtgagcag

SEQ ID NO: 239 - DNA, 930 bp, Rattus norvegicus
  misc_feature: Incyte ID No: 209251_Rn.1
  unsure 689-711: a, t, c, g, or other
agcgggagtatgttaagactaatggattaagtttcaatcatggaggtctgtcaggtgaggacctagctcggcagagccagcgctgagtctacaacttctcctaagaggtgttccggccggcgttggggtctctgcggaggcggctaaatcggccgcagtttctgccatggttgcgcccgctgtagttgcgcgcatctgcgtaaagaacaagacccttcgactatggagttcccatgttgttgctggttgttagtggttacttttggtcttcgcgaattttcacaaatccgatatgatgctgtgacaattaagattgatcctgaattggagaaaaaattcgaaagtgaataaaataactttagagtcagagtatgaggaaaataaagggacttccaccttttgaaaactggaagaatattcgtggtccgtaggccttgggaagatcctcaactcctccataggacgataacccagaaactcttaagcctaagacaacctgactgtgctcaggtttagtctcgtaactggtttttcaatgacgtagtgctcatctccatctgtaggcagaagagtccagacatatggaaacctggatgtgaataatatgatggcagaaactggtattataaagtcacatataagtctctatgcttttcaatcagtctatttgcaaataaaaatatgttgannnnnnnnnnnnnnnnnnnnnnnacacaccactacaaatctataaaaaatgtgtgcccttggttccccaaaaaggtgtgctgtgcatgctactttcctattacccactcatattctttttccaccactaaaacatttgtgccacttcagtggggtctctgatgaaaatcataggcttagatctagaatttccccaataacattgtgactgcgtttaagcctataaataagtgatcataatcc

SEQ ID NO: 240 - DNA, 523 bp, Rattus norvegicus
  misc_feature: Incyte ID No: 209548_Rn.2
  unsure 440-467: a, t, c, g, or other
gcaggctcagcccctaggggacctggagcctgaagccatgctggccatcctcaggtccttagacctggagggcctgcagggcaggctggccaagagcagtgaccatgtggagaagagcccacagtccctgctgcaggacatgctggccacggtgggcgtgttggaggagaatgaagctgactgctactaaggcatgtccccatcctgtccctgtctccacctgtgccagcagaaggactccagcccaggtcggccgctcaagagaccctcggggagtggatcacatgtcctacattttaggccggggatgataacaccctgtggctgcagagtttggaaggccaagggaggagaatacagagtccctggccagtctggactagatagcaaccctgtctcaagaaaacccaagaagtcaaatcaaaacaaaactcctctgnnnnnnnnnnnnnnnnnnnnnnnnnnnncagaccagaggtcggcctccagtgtcttcctcaggtgctgtccaccttgtttattg

SEQ ID NO: 241 - DNA, 2863 bp, Rattus norvegicus
  misc_feature: Incyte ID No: 210024_Rn.1
atgtgtagtgccaattagctaatcagggacaaagaaatgatcagatgactttctgacatccttgagccatttctctgtgtgatatggactttagattagtgccttatgggttttgtttgggccatgggctgtcacaaccactgctacagatagcccattttgtattgtcatatgatgggaccaataaggagcagggtgtgtgtgaggacgattcctggaaaccagtttgtcagtctttgcctttaacctatgatttttagccaggcataaaggaggaaattacgaggaagagcttttgttgtttcctggtgaaatgagaagccctgcgaatgggaagtttgctcaaactgttcctaaaaagcagagctgggcctgcccctggcttggccacctttcactgggacaggtcaaggcatcctaggcaaagggtaggaagtttatgagaaagctggtctaacctcacatatcttatgtcttccctccacactattaatagacacttaaaattatttcattccagtctcctatagccagggaaaaaagcctcatctgaatcattggatttttagttaaaagggagaaattatagtctttcttcaatatgtggtactgttttgaaaataaatataattcagttccttggcaagtttagaaatggggtttcagaagtgactgtcatcttttaaatacttactatgcaattggttttatgtatttgagaatatcgaatgtttatcttttgatctctcaagcattgttctatgtcttcaatgtctcatctactgtatacaaagccttctttgagcagcttatctgttctacatatttcgataactcagtaagagtattaatcatatgcatgcacaggactgtgtgtgcacacccctttttacctttgctccaggcacgtttacgtgtgactgtgaatgacccgctagggacagtgaagacatcagggaaggaagcgcccctcaggcttctctttttcatcttccccacatccgtctggttgtttggcaatggcagtgtatgtcagcacccaacagttctctctcatctgggttcttgttccgttgctcttgagccagcttgggttacttcttcctgtgctcttgcagtcgtgatctgtgtctggaggtaccatggtgccgtgagtgctgccagtgggtctcgggtacaggcagatgtgccatgtatttttactaagtcttcaaccctcttgacatttgggtactatgtttcatctgttaacaaggctgagggtaaggaagataatgcctataaattttattattgagcttctagactgctcagaccaaagtcaatgatttgtggggctggatgaagaacactgtctactgccagtcatataaagaacattatttgagtcaagttcgaagcctacttgcttgcttcctgaatgccagcagctgcgatgtatatattacagtatgtttgctattccttccaatctgtgctgaaatacgggaaaaaatttttctagctcactgctttgttccagaaatggctggaatgtgaacagatagctgcatggatgtttgtgaccatgcttgtgcctcccaggagtagccagcatctagtgtccagtttggccagcatatgcaaagttgcagactacgtggcaggctggctgtcgtatggttagttgtggtagagcccgttctacaaccaacaggcttgccttagctgctctaaatactgtgacagagcaactccattctcctggaagaggcgacagaggaatgtttgcctttctgatagctttggttgctgtggaaaacaggcttgttttccaaacctccctagagttctccctgctcttttctcggagcttgcttttggtaagtgggtctctagttctgacgtctgggcttctcttgtctaggactgtggactctgcacatggcattcagatggttttctgtgtgtcgaaataaaagcatgtgagggtagttcctgcccggaggactctctcggagtccatgctttcctggtttgaatgtacgcagttgtctctcaagaaaagtgaccctactcacccatctccccaccagcacagtgaatgagtgcccgcgtgcggtactacacttatggatcttgatagactctacagttagacatcgctataatcttcagggctctgaggtcgtgttctcttgacatggacaaaaatagtgctggtcagagggtagggcggctgggtcacctcaggcccagagtggccaagcagggacttgagaagaaggtgctgctctttgcttttctgtccaagctgtccagcacctgatctagtgcctcttcccctgcagggcagggacccctagtgaattggagccaatgatgggtgtgggccttgtggctgtgactcagtggggctcaggttaaggtcccccttgaatttggatgcgaataaccaacagatatcaagtacctgtgaaactgcttcactgcttctctctctctgagagggaaacaaataatatttttcaggatattttgttttagtgttaagtagcatcccacaagctgcgtttttatttattacacgcacaaaaagtaaatgtgtttctacaaaataaaaagtctagagttggacactctgggcaaacttactgagatgcacaaatgtttctctctctctctgtgatgtgcaatatgcttggcgaccatagatatttcatgtttaatctgtaaatatgaactgtatttaaattaaatgagagattctttgtaaaaggaccagacgttcttttataaatgtactaaggaatatcttgttctttgaaatttattaggatttttatggataatttttattaaaagattctctttttgagttgtc

SEQ ID NO: 242 - DNA, 943 bp, Rattus norvegicus
  misc_feature: Incyte ID No: 210262_Rn.3
ctccgagacgttgcagagggtggacctgagactctctttaacttctggcacccgtgcatcaggacagcagagcggcgaagctcccatccagggaatgaatgcacgagtgtgagaccaggaagtacgcagcccatgcaagccctgtaccccctgtacccccagctcatgtgcttcacctgattcggcagaccgacacaaggacagtcaatgtgatcttccagctgtgcagatgtgccaggagcctacagcctgcacacatgaatggctaggatgcacacaaaccagccatggtcctaggtagtgggtgcctactgtccccagggcagttagggcatcatcccacctagctcacagcaatcaggccagcgccctaccagcaccaagggcagccttgcagctcatatctgaggcagccgcacaccactctgagctgtagtggcgtctagcaggggctggccatggacccctaaactgaactcacatacacggcccacgcagggcacacagacacaaataaaaagatgacttctttgacctcactggatttaaggcttgtatttcctgatatttgcttcagtttagttttctctttgacatcaaatattacctgagtaaaaaactttttgacattaaaaacaaaaacaacaaaaacagaaaacaaaaccccacaaaaccaaagcacagactctctgcaggcagagatgcggccggcaatgccacatgcatgtccaggtcaggcaaaggccctacacacccagggaggaggtgcatgggcacccagctccccaaacccacagtgagatgcactcagggccacctgctcctgccaaccagaccacaaggcacagtgaggtaggtagagccacaacctgccagacccacctgggccgagggtgggtgcctcaatgcctccccctcagcttctggtccttttggaactagg

SEQ ID NO: 243 - DNA, 2227 bp, Rattus norvegicus
  misc_feature: Incyte ID No: 210545_Rn.1
  unsure 1656-1710: a, t, c, g, or other
gtagctggagcactgggaagatggcggaggaaggggaaagaaaaaagatccctttggttccagaaaatctcctgaaaaagaggaaggcttatcaagcgctcaaagccactcaggcaaagcaggctcttttggcaaagagagagagaaaagggaaagaattccggtttagacgactagaatctttcgtgcatgattcctggcggcagcaacgagacaaggtgcgtgtccggcgactagaagtgaagccgcacgctttggaggtccctgataaacactccttggccttcgttatacgcatggaaaggattcaaggagtgagtttattggtaaagagcaccatcatgaaacttggcctgaagaagttgttcagtggcgtctttgtcagggtcacccctcagagtatgagaatgctgcgcacagtggagccttatgtgacctggggatttccaaatctgaagtctgtccgagaactcatcttgaagcgtggacaagcaaagattaacaataagactgtccctctgaccgacaacacagtgattgaggagcacttggggcagttttggtgtcatttgcctggaagacctcatccatgaaattgccttgcctgggaagcatttccagcagatctcttcattcttgtgccctttccacctctctgtggcccgtcatgctaccaagaatagagtgggcttcctcaaggagatgggctcgcctggctaccggggtgaccgcatcaaccagctcatccggcagctcaactagagcaggagcaggttttccaaaagcatgaattggaaatgcttttgtttgtataaaattagccaagtatcttcagagaagattattttctgccgttcgaaaactgaaggaaaagggccaggagaaccacagtagggtgtgcgagcatcgaagacatttagcagggaaccagttcatggaacagggcgattgttctccagttggctgcccgtctctgagatccgcaacaagctgtggaggaaagaaactgacctgccttccttccatcatcggtgtattaaatgattgggtgagcgactagcccaagtatccctcccacgccctccaagactcttaaagcagtggggcagaccaaggggcacacttgaatctggatgaagagggtcttggttttactttttatttttgtcagagatggttggtttgttcaatacaacgtcttcctgtgtggccctggctagccttaaactccacagcagccctgcctccgccccgccctgaaacccacgcccacccccagctgttggtgtataagcctgggggcttgttcctcaggcagaaaggcaacaatggtggtgctcagtcttatgtgaggccatgttacaaccgctttgggacctctggggcttgctgcccttgatcagtgtaacagcatttgtaccctgacctgcagtgacagtcctttcctgtagctcaggatttagaaaaacacaagcataaatccatacactgtgctgtggaactccacaacggtgacacacaccctcttggcacacggaagtcttttgtgaggacagcctgtttttctatgcacattggtctgtgaagctagtcttgttctgtgctacaggaggggactgaagttcaaccacttgttttcaactacgaaatagtgtnnnnnnnnnnnnnnnnnnnnnnnnnnnnnnnnnnnnnnnnnnnnnnnnnnnnnnnacgagaactcctgagttcaagaccacaaaagcatgttctacagagtgccaggatacccagggctacacacagagaaaatattagagaccaacaaacaccagtgatatgaaagactattgtttttaaacttcccatacccaggaaacgccccctaaacttcgcccttggcttaaggattcccgtcttgcctttccttaaaacccacatgagtccacattcctaacacatgcttcccattgggcttgcctataaccctgacattcatggggccttgggatatcagtggtaactgttgtagggcattgggaatagaggtgaccaaaaatgcattgcagatcattggagaaaatgagtcatggatcattaaataagattaggggagcactgcagtgttggtggtgcttgtatgctgtgtaagagcccctggatgagctgagccaagtctatcatttctagttgctcagagtataaagcaagggtttttttctatatagtaaaagatgatttttaaaatttt

SEQ ID NO: 244 - DNA, 735 bp, Rattus norvegicus
  misc_feature: Incyte ID No: 210822_Rn.1
acaaatcaaatgcctttattttcgctccttccgtagcacgtgagaaatggcagtgaccttggcaataggcttaggttctttatcccattgcgaagccagcaacacacctgcatggatcttttcccaaagtcatagaaatggttgtctagccccagtgctgtgacctagagctcattacctgactcctgtgtctggggctaaaacttatttgcctgagtaaagggacttcaatcattgagttcctccacactgcatcttgctgctgaggtggcagaagattgctcttgattgtccctgttctattactctaaggcagcctaatggttcttatggtcatggattccaggaaaagctgcccttggaagctcttgaaagacaataaacatcgaacaagtgttcaagttgtggcttacacggccatcacagaggctgagtgagcagtcacccagggaggaggatcccagctcatcccattcccatgaggcaggtgactagaaggtaacagcacccgggtcagccaatgccttcctgtgtccacacctaggaacaccttccagttgtccaagcagccgtagttgtaaggattcctaaacactctgcccttggcctgtaagccggcgtctctctcttctctggttgatatgccttttcgagtgctagtctcacccctggctgatgaggacagcatgccacatggttaggggcacccagggccaggaccacagaactgcacag

SEQ ID NO: 245 - DNA, 816 bp, Rattus norvegicus
  misc_feature: Incyte ID No: 211215_Rn.2
aacttatggatgtaaggacttgtacctgatttaagatggtgatgagcccacagtaggcttatttacttgaaaacagtttagtcatcatgtatttccggttgctaaatgtgcttgtgtttataaaattcaaaactctatttaccaagccttaaccatatctccatgttctcaccggaagtgatttacactgtagtctttgtctcttttacaaatatacaattttatgttcacacttgttattttgtaatataattcctaggagatgtttcagagttcaaactgcaaatatgcccatttaataatgattattgcatcattatcttgctttaactatttaatcactggtatttttagtggtattttctcacagaaatctcttcttttaaccaatttttgtgactgctatacggtcagatattactttatcttttatcttttattgaaaacaaaccatatttccagttcccagggttaacactcttggttcttttctttttattgttatttatatggatttatctagagtaccaaaagaaagttatattaaaagaacagtattaaagaattgcctaaagcattatttttgtacttacagtacaatgttttatagagctgtatgatctaactatattaagtaaaattatatcattctattattaggaacatgatgattgctttagaaaatacaaatatactggtcaccttagaatcatacatcaaaatgaaatgcgaaatgacacaattttgtgagatttcaggacggtgatatgggtttaattatgttttcaagttccataataaaattttatcaacgtg

SEQ ID NO: 246 - DNA, 767 bp, Rattus norvegicus
  misc_feature: Incyte ID No: 211417_Rn.1
gtattgggaactttttaattaagctgagatgctgctaggcggcctgtgttgccaatcaaggaacctttgaatttgaaggatgcttgtctctggaatttccagggtctgagtatttatccaaaccaaattccaccgtgctgcaggtggctgcaagtcttgggcagggtatttaagtgccagctttgcacatctcagtacacatttggtgtgcttgatgcaaagtctaggactgccgctagagggagccctccctcctcagctagagcttgctcaggcccgggagtttccgttcacacaagcttgaggtctttccaagagtgtttgaccacctacttggacactgcctgggaacaaacgagcggaagcagagcccccttggaaactgatctctacatctctctagcaacgtgtctagcctgtctggagtcccagagtccaggagaaagcaaaggaacctggattagccacagtcagggtgcagtgcagtgctgaggtacagacgggtcctcacagagtagcgaattcagcctgcctttggggctcttgacccctctggatttaaacaggagtggactgttctggctcctgtctttagagcaaagcagctaagtcctgggaggagggaaggagagagggagccagggccccagggcccgcaggagggactccagatgaccaggtttacctgacagcaggatgcggtttgtaccacagagcccgcctcctgctggggtctttcagtggcttcttcctgtgggggaattgta

SEQ ID NO: 247 - DNA, 1655 bp, Rattus norvegicus
  misc_feature: Incyte ID No: 211502_Rn.1
  unsure 1056: a, t, c, g, or other
ctcagactctagctggtggggtaaccaatggtttagattttgacagtgaggaactggagaatgatgtggacatcctccttcaggacaccaccaaagaacctttggacctgctcgaaaacccccatgagacgctttataccaacagtgtgcctaagcctaggatcttggatgctgaacttgaagcggaacgtgagatactatccttatcagcaggaggtttggtcccaagcagtaaatctccaaaaaggcaattggagccaactctctaaagccattgcaggaattcaagcaaaggaccctcatgtattagagatgcagccttgtgcgtgtacatagttatttaatgaaaaacactgagaagttgtcagaagaggaggaaagaaccacctggatatatctggatgctgccgctcataccaggacagatccaacttctggaagccatgctatggaggcgtgctctggtgatgtcatggacctaccttctcgtctttatagtgccacaatttatacagttctgtgtttgacccatcgtcttcatagcctgcagttcttgccattggctctgttaggtttgtcttcacccaccaacttcattccagccagtgaaggtgaaaggtttgcagcttggcccatcaaagccagccctcccttccactcccaaggtttttaaaccactcactcccctagcctgtgctttattggaatgggagtcaaacgagttttattcagagagaccaacagccgggtgtctggagaaacgctgtccacaagacgtttctctacatgcttcctcagtctctgggcattcgtggctctgaatgttggggtcatggcggtttccgggggggcttatgtgattggggagccacggccacttccaacttaagccgaaaccaggcctgtggatgaggttggggaaggatcaatctgtcttttgaacttgagcaggagaaacacaaataaactccaggccccagggtgtgaaagaagctgggttctccaattttggcccccattattaaattgatcgtgttttcttgggaggcaagccantcacagcggagcactcacatttaccctgtttcttgaggcgctgacactcaaactggcaggctccctgttaggatcttggaagcgttcttaccatgtatccaccactcagggtcagggggcctgagccaggatgtgcaataggaggaggtggcactcgcctgctgcatcttgctgcatctggctgcatctgctggcatctgctgcatctgctgtgtgctgccttgggcctgccctgccctgccctgcccctgcctcctgcaggcagctctgtgcttcggtgaactgcagaacaggcaggacgatgtagatctgaatgctatgttggcagcgtggagaagaaacatgacagccacactgccagtctgactgacccagggaacggtgactgcactggaacctcatatatgacaactgcccctcctgacttgatgagataaacaatggagacagaagggaggaactttgacctcgggaccaggagcaccaaatcactgtctcccacttggctttggcaaatggaatactgggggtgaagaaaaacaatcactattttttcttttttaactctggtaaataagttaaaagagaaaaacaccaag

SEQ ID NO: 248 - DNA, 434 bp, Rattus norvegicus
  misc_feature: Incyte ID No: 211742_Rn.1
gtccccgcggcctgtcggtcgcgtgcgggaagggggtgtcttccggtcgggccgagctaggtggcgtgggtttgatggaaggacactcggctgcagagtttgtagattcggacgaagaagattgaagtcatggctggtccagaaagtgatggccaattccagttcactggtattaaaaaatatttcaactcttataccctcacaggtagaatgaattgtgtcctggccacatatggaggcattgctttaagtctgcctatactttaagttaaggcctaaaaaaaaccccagctgtgaaagcaacataaatggattttgaaatgtctgggccttatctgttaagtcctacgccatgaagaagctgatgtgaactacatcatgtaatactcaatttgtcacaatcaaattatgaacctggaaataaagaagataac

SEQ ID NO: 249 - DNA, 1021 bp, Rattus norvegicus
  misc_feature: Incyte ID No: 211830_Rn.1
ggctagagctcgactgccacctcccggctcaaggcgagagagagcagggaggtgggcggtgcatctacatcccgctctgcgcaactgcgcggattggcttagctccctgggccacacaccctccgctcggctgaggctgggcattgggcgccttggtgaccagtcagcgaggctcttactaaggagtgtctgaccccgcctatggtcggaatcggctgtggagaccttgcttgtgtctgttgaaaggagcggacaggtcggtgttttaaacggctaaagggctgccgggaaacccgttgtctgaccctcaagtccggaaaaagggagaagagtctttgagggccgaacttctagagccaccagcccagagcgtgattgtagtccgggaaccctagcatgggtttcctggactggccgtgactcaaggcctagagtagcggggagcaggacaggactgagcaacgataggacaagcaagacggggaccacagcaccattcagctaagagtacggggtcgactcaagaaaacaggcttcctactcacaaacaggaagctttgtcgcacaactaaagagaaatggttccagtaattctcgtggtacccggatctttgaccgggcttcaaagcatcaagcctctacgcttcaattagcgcgagtctcctggcaggacatagacacacctctgaccagacacaaagcgctcttccgtggaaacagttgcagcccgctactcggagaaagactttaatagaagggactatttgatgctaacaacgctggagaaatatggctcttgagcccacaccaggaaggacaaacatgtatccaattgtatccacaagaatttcccacgactagaagaccagtcacagtggctaaaggctttgtctacaaagtggaaacaatactggaccatgccttggattctgagtgtctcaatagagtaggtgcagctacacttgtgcacttctattaaatgcctttagtatcttgtacaatatatgttctggatcaagtc

SEQ ID NO: 250 - DNA, 1009 bp, Rattus norvegicus
  misc_feature: Incyte ID No: 211876_Rn.1
cagatttaggaatgtggagaaaggcatttcgttgattccattgaggaatctgcataggtatgcactcgttctgttaagagcaaatatctgaaaaggacctccgctgtgctgttcagggcacacggggagtattttaatgcaccacaggagagcacagcccagtgtgggcccaggagcactggtgcctgcgtcagaagcatacaggtgtactatgcaagtgtattctgccacaaccaccactgtctttgttactttttttgaacaagaatatatccatcgcctgatcctgagtctgtggagtaccacagttgtcctctagtgcttgcacttgtaggccctctgacttccatttctaaaatgggggtctggccctgctaaacactacaggtaggttggtcttaagtccactagtacagaatgtcaagacgagaagccgagtgctgtgccatctgattgacttgcagcagatgtgaattctgaatggattctgagttgacggacacctcgccaaggacaagctgtctatccgggtctgcctcctgctgctgtggtgcggctgttgactctgggagatattccagagtagcacatggggtctgcagctcatgaggatcggaatcatccagaatagttaaaattatttaaattgtgaagcctgttgctaaagaatatttatgaacactggtccatagcctgtactaattcacacattagcaatattgactgtatctgcattaaggagccaccgtggggccgttcgagtgacccgcaaatgtgcgttttaaagttctgtcatccacaggcacaggtatgtgtgtccatccccgtaatggtgaaccagatgaattggacctggactaccaactgatggcctatatgatatcagtattgacagaaaagataatcatgatttcaatattactgtgtggacaacaatgtggacactaaaattgacatatttttatgtaaagtttttctattctttgatttttaataaactttagaaacc

SEQ ID NO: 251 - DNA, 512 bp, Rattus norvegicus
  misc_feature: Incyte ID No: 212139_Rn.1
agagagagagcgccctgccttgtgcatcagtgtagacaaactgcaaatgcattgttagcaaaggtgtagtgtaggtagccacagggaacaagttgtgcacgtccatttacatcagctaagacagcatacacggcctggacacacgaaggtggtgaacactaaactaggggaagaattaggaaatttaggaatagcagttatttctgggaatggggggtggaggggtgtagcaagaaattatgatcaaggcagggcaatgaggattcttttttgaggtgtgtatgcaggtgttggtgtgtgttgaggcctttggctctgtccaccttcgggttttgatgttgttggtttggttattttgagacaggctctcttcctgacctggaatttcccaggcaggctggctctgctggctggccggttactgggccccaggaactgacgaactctggctctccagctcttgttctattaccctgtgcaactatgcttgttcttaaagataaagaaaaaaa

SEQ ID NO: 252 - DNA, 1223 bp, Rattus norvegicus
  misc_feature: Incyte ID No: 212178_Rn.1
cacgggccaacgccgtttcgcctaggtgagcgtgccgaggcgacaggtgccgacctgccaggtgggtgctgtcccgaagcgcagcgagatcggcgccggtttggaggtttggagcccgggacttcaacctcaccgccccatcctgtgtcaccatgttgtgcaccctgttcctgctactgctggccctgggcatagtgcagacaactcggccatgtgtccctggctgccagtgtgaggaagagacgtttggcctgtttgacagtttcagcctgatccgagtggactgcagcagcctgggcccccacattgtgcctgtgcccatccctctggacacagcccacctggacctgtcttccaaccggctagaaaccgtgaatgagtcagtcctgggagggccaggctataccacactggctggcctggatctcagtcacaacctcctcaccagcatcacgcccactgccttctcccgccttcgctacctggagtcactggacctcagtcacaatggcctggcagccctgccagcagaggttttcaccagctcccccttgagtgatatcaacctgagccataatcgacttagagaggtctcgatatctgccttcaccacccacagccaggggcgggcactgcacgtggacctatcccacaatcttatccaccgcctgctcccctatccagccagggccagcctgtccgcacctaccattcagagcctgaacctgtcctggaaccggctccgagccgtgcccgatctccgagacctacccctgcgttacctgagcctggatgggaaccctctggctaccatcaacccaggcgccttcatggggctggcgggcctcacccacctttcactggcaagcctacagggtatcctccagctaccaccccatggcttccgagagctcccaggccttcaggtcctggacttgtctggtaaccccaagctcaagtgggcaggagccgaggtattttcaggcctgggtttgctgcaagaactagacctgtctggctccagcctggtgcccctgcctgagacgctgctacatcacctccctgctttacagagtgtcagtgtaggccaagatgtgcagtgccggcgtctggtacgggagggtgcctaccaccgccaacccggttccagccctaaggtagtcctgcactgtggagacacccaggaatctgccaggggcccagacatcttgtgacgaatggtg

SEQ ID NO: 253 - DNA, 1145 bp, Rattus norvegicus
  misc_feature: Incyte ID No: 212438_Rn.1
cactttcacacatgccgcgtccaaggagcttggcccctactagataacgacttcctcttgtgtccaagccaccatctcaccggtagcatcgggagccaacgctaccaccatccggaagatcactatcatatttacaaacatgcaggaatgcattgaccagaaagtctaccaggctgaggtagacaatcttcctgcagcctttgaagagtggttctgtcaatgggggcgaccgacctggggactcgagtttgtccattcaaactgctaaccttgggagccacgtggagattcgagctgcctacattggaacaactataatcgttcgtcagacagctggacagctctccttctccatcagggtagcggaggatgtggcacgggccttctctgctgagcaggatctacagctgtgtgttgggggatgccctccgagccagcgactctctcgctcagagcgcaatcgccgtggggcgatagccatagatactgccagaaggttgtgtaaggaagggcttccggttgaagatgcctacttccaatcctgcgtctttgatgtttcagtctccggtgaccccaactttactgtggcagctcagtcagctctggacgatgcccgagtcttcttgaccgatttggagaacttgcaccttttcccacgtagatgcggggcctcccctctctccagccacctgccttgtccggcttctttcggtcctctttgttctgtggttttgcattcagtaagtaggccagcaacccgtgactagtttggaaacggtttgaggagagaggttgatgtgagaaaacacaaagatgtgccaaaggaaaccagtgggaccaggagccacgacccttactcaatcacacgaggttgcagtccagggctgaaatgaccctagaataaagattctgagacagggttttgcactccagaccttggtatgggctccccatgaatttccccattagtgatttcccacttgtagtgaaattctactctctgtacacctgatatcactcctgcaaggctagagattgtgagagcgctaagggccagcaaaacattaaagggctgagatatcttaaaggcagaaactagaaaaggggaaaccatgattatctataagaaaatcaaaagaggggtt

SEQ ID NO: 254 - DNA, 1692 bp, Rattus norvegicus
  misc_feature: Incyte ID No: 212469_Rn.1
  unsure 1195: a, t, c, g, or other
ctttacctttggtcacctgactcatccgaccaacgagaggcggctgaatcagtacttccgcctctgtgtgcgagtcactatgcccacctcaggaattctctgattggctgtccttccgaaactcgctcgcttattggccatcgcgggattcggctctccagcggcaacctaaagctgtgtcagacaagcccggcagcccagtagccatggcgtcttattttgatgagcacgactgcgagccgttgaaccctgagcgtgaagccccgcaacaatatgttgctagaactcgcgagaagagtgcgcggggcttggagttgggcccctggccagcagatcactctttaataggatggactttgaggacctgggattggtagattgggaacaccaccttcccccgggcagctgccaaggctgtggtggagagcctccccagaacagtcatccgtagctccaaggctgagctcaagtgtcccgtgtgtcttttggaatttgaggaggaggagactgtcattgagatgccctgccatcatctcttccattccaactgcattctgccctggttaagtaagacaaattcctgccctctgtgccgccatgagctggccaccgattgacgacagttatgaagagcaacaagaaagacaaggctacggaggcagcagcagacaagcaccgcctggagaacctccatggagccatgtacacgtgaggcagcagctagggctgagaagctcagcctctggggattattcttccctttgcactttgaatcttcattaaaggtttctttaaccaccctgcagctgcactgctcaccagctgaaggggcttcgtccgaagtcctccaacctgctgctagccagaaagatgtcaaaggtgtcaaaaggcagaaggtgccgggctgcatttccctctctgccagtctctagactctgggtggtggagccctgggagcaacaagggcttgggtctgagtgttcttttagaaagtcaaactgctgtcagatcctggcactttgtagctattttatatctgataaattaacttgcaccaccccctttccggataatctcctagttaagccttggaactttagttaatcacttggaatcgctgggagtgttcgttcatttcgctacagagtgaatacttgtaacacttgtcaaagttgctcgtgtgtatcctgcctcnctgtaggcctctttatcataggtatatctaaagttcgatacctagactgtagttaggggcactagaagttctgtttagctgtttagtactctgtaatagggggacaaggacctctgtcggatggcttcttgaaagtagggttatcactactcgtgatccttggcatggactataggaggcaccacgtcgatagtaagatccaggcttagggcccttgaactatagattcgttctgcgctctaccttcccagtagcttgggagttgctggtatgtatccagcatctgtgtctcagacccttatgatgtatcttgaatggcatctgtcagctttgagttcgtggcaacgtctacaagaatctttgtctggaggaaaaggacttctttccacccctccctaactggatgggaccctcccgtgattctccagtaacgagactgcaaacatgcaaattagaattcttttaatagatataaaaaagtactaaaataaaaaaaa

SEQ ID NO: 255 - DNA, 1290 bp, Rattus norvegicus
  misc_feature: Incyte ID No: 212503_Rn.1
tttttaattttttttttattcattttctttctgctctgcacacggctcttggcgcacgcgccgcgcgcactcgggtgattttttttttttcttgcactttgggaatctctagcgatcgatcgatgggatggctcagtggtcagagcccggtcgaacagtcacgcggatctgtgactgataaaggatggctggcccccatcgtggccggggagcaaggcgtctcagtggttagagcgccggccgccccccctgaattgctgacttaacaaagatggcattccgggcccctgaagcgaggggtggggctggcggaggggtttgcggcagctcaagtggtcagagctcaattcgaaaaatcgcgccgatttatgatcgattaacaggtggcttcgcggctgcggaaggccgctcagtggttggcgcaaccggcgacgacgaacggatcaaggacggcgttccgcggcctgaaccgaggagggggactggggaggcagctgagtggttagcgctcaatcaaacaatcgtgccgaatttgtaatcgattgaagatggggaggtggcctcagtggctcggcgttcggtgccgaactccaaaatggctgccggcggcctccgcaaagcgagggggcgtggctcagtaagacccaggacacgggcacccaactgcgggttcggcgcacgcgcggctcgaaggcctcgcacaggcgccctagcgtctcgtccacaccgttgtgcaccaggcagaggtcgaagaggtgggcgtagcggccccggatggcgtcggagtcggcgcggagctggcgcagggcctcggtctcggcgccctggtccgtaggcgcgcatgaagacgatgaagggcgagagctcagcggtgcgcacggccttcagggtctggggctcgatgtccaggacggcgacctggccgcactcgtggatgcggcgcacggcgtcgagcctggtcccgaacatgtcgccccggaagctgccgaactccaggaactcgttggccgcgatgccccgcgccatctcctccgccgacaccgaagtggtactcggcgcagtccgcctcgacattccgcgggggccgcgtggtgtgcggagcggggtaggcgaacctctccgggtcctgggcgagcagcgcgttcttgatgtgactccgcccgacccagctggccacgatgagcaccagcgtcttcctcttgaacgcggggagccgcacgacctcctcgtaggagacgacgtccaggcggtcaaagatcgcgctgtgcttggccaggtatttgtccttgc

SEQ ID NO: 256 - DNA, 1558 bp, Rattus norvegicus
  misc_feature: Incyte ID No: 212791_Rn.4
ccggcctatttcagaaagaaccacaagtcggagggaagtggagagtcggatctcaggtcttgagtccagtgaagcacgtcagaagttcgcaggagccaaaggcatctcgtctgacatgttctttggtcgagaggtggactctgagtatgaagccaggtctcggttacagcagctttcgggcagcagtgccatcagctcttcagacctttttggggatgtggatggagctcatggaggaggaactgtatctctggggaatgtacttcctacagctgacattgcccagtttaagcagggtgtcaagtctgtggctggcaagatggctgtgctggccaatggtgtaatgaattctttacaggatcgctacggttcctactgatccaggctccatggctcaggcctgtggtggtgacagcaagaaccctgattcccaggccagagatgcctatcttgtggatctggggattttgactttgtgtgtgtggtgtgtgagttggatgagttgggggatcttggcaaggggaatggtcagcatcagcccttgtcctcagcctgtgctttgagtccttgtcccccatccctcacactttccctccatgctagtgtccttccctctggtcttgccccaaagctgctgctgcttggcctgctgtactgggagtgaggggaggagtccatcaggatggctttatgggtctagttctccccacgagggaaggcctaaggctttgcaggctctaggatccttgtaggtggtttgagggcttgggcctccatcttctggaggcaggggaggcctagcaagagttgtgctgtatcagcccttgcggggaagttatggatttgccactgctgttcctgtcagtggcctcttctgggttccagggaaggatgggattaggagaaggaccctggtagctcactaagagctagaacttttgctttggtacctgaaggttttatttgggatcagcctggaggcctgagcaatcttccgttgtcacagctgtcccttggaggctgtacttctgcctgggtgtttgagagcctttacgctatccattctctgtggatcacagctaccctctgtctagtgcgttgaggtcctctctttttgtgtcctgcgttgggccccatggtgtagtctcacgctgtgtcctgcttggatgtctgtgaacctaattagctgagataagctgagactctgaggagaaagaagcccctggagctcagcttttatcctctgcatctatcctgggtttaggggtcctggactagcacccctatcaacctagtgagagcttgaggacgctgcagctgcaggctccataagcactggcagctgggccatgcactgtgtcatcccttggtgccatctcacccatgccacgctggcagtactgggcccaacctctacctgtggccttgcaggttgggctcccgaaacaacgaccactcttccctcatccctccccagagggacatgactttctttcagcactgtttgtattgaaacaaagtggtgtcaaaataaagcccccacggagcactgcgggtc

SEQ ID NO: 257 - DNA, 1449 bp, Rattus norvegicus
  misc_feature: Incyte ID No: 212916_Rn.1
gaggacaggtccctcattgtgcagttttgtgccaacgacccagaggtgtttgtccaggcagctctcctagcacaagattactgtgatgccattgacctgaacttgggctgcccacagatgatagccaagagaggtcgctatggcgcttttctgcaggaggagtgggatcttcttcaaagaatgattctgttggctcatgagcgactctctgttcctgtcacgtgcaaaattcgtgtcttcccagagattgacaagacagtgagatacgcccagatgctggagaaggctggctgtcagctcctgactgtgcatgggcgcaccaaggagcagaaggggcccatggcaggaacagcctcgtgggagcacatcaaggcagttcggaaggcggtgggaatccctgtgtttgccaatgggaacatccggtgcctgcaggatgtggagcgatgcatccaggacacaggcgtgcagggggtcatgagtgcagaggggaacctgcacaaccctgccctctttgagggccggagccctgctgtgtgggagctggctgatgagtacctggacattgtacggcagcacccttgtccactctcctacgtccgggcccatctcttcaagctgtggcaccacacggctacagggtacattcagcagcttcgggaggagctggccagagtgaagaccctggaaggcgtggctgctgtgagccaggcgctgaagcttcgctgtcaggaggacatggccaggcagcaagaaggagtgaggccagctgacaacttacctgactttccactggatctgccagccttacatccgtaccaggacctaaggaagggagtcaaggagaatagtagtggtcgaagcaagcgggctctggaggaagaagagggcagcatggagggcttgtccaagaataagctgaagaaacaactgaggaaccctcacaaaacatttgatccttccctgaaacccaaatatgcaaagtgtgacccaatgtggaaatccaaaagggcaatagaatgttgtgttttaatctgtgccgtggctgctgcaagaagcgagctttcagggagaccgcagactgcccaggtgcatggattgctttttaagaccaaattagagaagtctctggcctggaaagggatccagcctggactgcaggaagctcagcaggtgaggcctgtaacaccaagtggtttctctgaagtcatgggtagtgccctagcctgaaagccagcaagaatcatctccacccaggacagccactgaagcctggacattctttaaggaaatgcctttactcagggaatctccttctttgacacagaagaacatgttgatgtctgcataggtggggaccggcaatgttacaccaagaggtagtaattggttggacttgccatattactacatgtgttttcagaactcaacaataaaccatttcagagccgc

SEQ ID NO: 258 - DNA, 919 bp, Rattus norvegicus
  misc_feature: Incyte ID No: 212980_Rn.1
ctgggagccactgactgccttaatcccagagacctagacaaacctgtccaagatgtcatcactgaactgacgggtggaggtgtggatttctccctggactgtgcaggaacagctcagaccttggtacgtggacttctcccgccatccccagtccttgattcttacttctaataagttctttaatcaccaaaatagcaaggggaaatgagccatgtttatagcagtagatgttcttcttaatatttgcaaaggcagacagagaagaacctctgctgtaggtcaactacccactccctcagccatgctaacttgtccatcaaagctcactgatgtggtttctactggtttgttttatgctattgtcatgaaccactctgtgtttggggtgcctattaggagaagagggtaatttaccttacattttggaagctgaatgaagtctacacagcacaaggccaacttgggtgactctcccatcggtatcacctcacctgaacgggctgatggcgggagtaatgtgtggtcccttagggatctctaaagattccaacagttatctagctcacagaagacccgcgcatgactccctcaaaggcgtagtcagaccaagtccgagtcacgtgagcgctttccccatgccggcgtactctgtgcgttcaggcctccaagatggcagccatatcccatagcttaacacgggctcgctcttctgggatctcatccttgggcggaaaacaatagtttcaaatatttgttcccatagatgattcgaactattgctaagagataaacttgggggtccctttacttagaccaggggactataccgctgacacaagaaatattgtcaccttagttctctgacctatggttcttcctgtttcgctgtgagtgggaaggagttgtgatgtttttcctt

SEQ ID NO: 259 - DNA, 2213 bp, Rattus norvegicus
  misc_feature: Incyte ID No: 213058_Rn.1
ggctttcccgattctgcttggaggagaagaaaggggagatctcagagctccttgtaggcagcccctccattcgagccctctacaccaagatggttccagcagctgtttcccattcagaattctggcatcggtatttctataaagtccaccaacttgaacaggagcaggcccggagggatgcagtgaagcagcgggcagaccagagcatctctgaagagcctggctgggaggaggaagaagaggagcttgaacgcattgtaccatctccaaaagaggcaaagcttccacaagagactagaattttctacagtccctgaaaatgagccagccccccagagcccttgtgaagagattccagtggaggcccctgcagaggctaccccatcagagagcagtgagagcatctccctcgccacacagatcgcaaacccagcagctgcacctcagccaccagagctacctaaagacctgtcccaaaagcagctcgaggcgtctttggaagaacagagtctggctgaggatgtgggtgaaactggacccccaccccccgttacctccaagcctctaacccctgcaggccgagccagtggcctagaacccaggcctccagccagagtagagacctgagagaagaggtgccacagacttaagagtgtttgagctgaactcagacagtgggaagtcaacaccctccaacaatggcaagaaaggctcaagcacggacatcagcgaggactgggagaaggaggttgacttggacatgactgaagaagaagtgcagatggcactttccaaggtggaagcctctggggagcttgaagatgtagagtgggaggactgggaatgaggggagccggagcaagcagctcccccacccacggcacattcctcctccctcgctcgatcctcagtcagccttggaagacactgagaatgttcccacaaatggcctctgccatccagaacttcgaacatattctggtggctccctgctggccctctggtcacaccttggaagagcctttttaaatacagatccagaagtctgatttgtgccaaccttaggatgacctaaggcgaggacccaccctgcccccatcacgggagagcctgcatttccctgctattgtggggatccctactgggaaacctaccagggggcagttgtctcctgcagagacaagagctgaagccctggtctctttgaagacaacacacactaccccataaagctagtaaagtcagcaaggaaggccatgccacctgcccttggctacccaggaacactggacgacggcttcattcctgtcccagggaggaaggggcagtcatctctgggacacctgcctctgggatcgccatcccaaccatttcccattcctgggaagtcctatgggctcagaatcctaagaccaaaccttaactcttctccagtccacaccgggatatccctacaccttcccagggcttttatgtcacatgcacccaagtccttagcccatctgtgccactgcaagagtctgctcttgtatttccctccctccccaggaagggaggagccactttcaggcccttcggtgtgttgcctggtaggataatggctccaagcagctacctacctaccttgactcccatagcttaggacaagtcctgctatgaactatatgtagtgaacagagaggagtactcacaggccagcccctcctcagccctctgttcttgaggggatatgctgggatgagcatcctgagactatctcctgcagaggccctccttcctgaagacagtcagcctggggctcttaccatccggagacagtgagggccgcatgaagacctggtgcacagatgctgctctggtgatgctgtatgctggcacatcccaaccagtgaactcatttaaaggagcttaggtacaggacgctatgaatggtagggcacttcaaaccttcagtgaaaggggataagggtggacagtatagataaattttttttgaatggagaatagaggttttttctactttgtaattattttaattaaccttttggttgtttgtgcaatattatatattttaaattattaatgcatctccgccagagtattttgtagctgggaaaagaaaaaaaaaagtaaagaaaaaattctaacagctgttagttttgtaattaaaaaggaacaaaaataaaagaagtttgtccatagagccttttaca

SEQ ID NO: 260 - DNA, 657 bp, Rattus norvegicus
  misc_feature: Incyte ID No: 213233_Rn.3
ttcactgtaggatccaagactttttcctgtacgccttttccgcctgcccttcgtggctctggaagctcctgccgcctgttacgttgtcctgaaggctctccggggtcacctgctccatccctgaaaggatgccctgcactggattcccgtcaaactcccagcacccaggagtgtgtgcagagtcaacttgtgttgctgaactgcccattgtgccagaaggcatttgacccgaagctgacccagctagatgtggctgctgagaggtctctgggacacctgagggctggctccttctggttttgttcctgggcacaggacgtagtgctggtcactgacagcaggcagcagatcccctgcgggctcattttcattgtcagcctaattggatttggaatcaccgaggagacacatctcagggtggagacacatctcagggtgggcctgtgaaactgtttctagagattaactgggaaaggaagagccacttgaatgtgggtggcacccgtggcctggggtcccactgattgactatgtgtggcaccatggcctggggtcccactgactgaaaagggaaaaaggagaaattgagctgtttcctgattggggatgtgatgagacacacttctcacctatagccctccgtgccacgggactgta

SEQ ID NO: 261 - DNA, 1223 bp, Rattus norvegicus
  misc_feature: Incyte ID No: 213260_Rn.1
catgttgatacattggatttttattttctacatttgcagttctctttcttcacagacaaagcatttatattaccggggacagggaattaagctggcgggctcagaaatccatgtgtacgtgtctatccattggagacattcttaaaagttaaaaacctaagctcacctcgtcccggtgatgctgttcgctgtttgcaatactctgaagatctacagcaaagcaaggggatcctcattcgtaaataatttccagtgcacgacggtctttgaatttaccatgtctagaatagagttcagtttattttagctcacataggaattcactggcatccatctgccgttaatataatatcaagtggttagaaataaatgcaccaacgtgaccccaaaacacaggctgccgttcttgttcacagccatagatgcttacatggggtggagttcagtttcccctcactgcccagaatctctggctttgaccgttgtttttcaatcactggtcgtttattttacatttcaatacgaagccaggtctgaaatgcacgaatcatccaggtagtgataatactgtcacactgaaacagcttttctgcagtgggtctcagaaacatgtttgtttacgtgtcattttctggagtttagtactataaaatggtgtgctttgggacagaaaccgagcattacgagaaactatcacaaattccgagttattatcatccgggagaaaaaaaaatcgccaaataggacctgtgagatgtctttccgtttttcattcacccaagaaataaaccaagattagaaagcgaaaagggtgcattgcaaatattagatatgtttcatctgaacatattaaatgtaaatagaaaagattaatccaaaaattttgggagcctgtacaatctgtatatatttcaaatattttacatttagaatgactaactgggaagcatcctcttgtgtagtcagacagatactcaagagtaatacagcagtgccttagactacacgcagctccactcactcgcgtggccgtcttcaggatcggagctcacacaagctgcagggcagatacgcggagtacattttttttttttggtaaatttaacccatttgtaaacagatacaaattttattttcttacagcctttataagatggtttgatgtactgggaggattttttttattacagaatgtatattggtatataataaatgaacttttc

SEQ ID NO: 262 - DNA, 871 bp, Rattus norvegicus
  misc_feature: Incyte ID No: 213276_Rn.1
agtccttctctccctcctctccctccccctcctcttcttcctttcccttcccctctcgccctaagcatctctcacattttgtgatatgtgaaaatagatggtgcttcaaggcacttaagatctttaatctgcatttttcgtatttcacaaagttgaagcgccccattcttttaaatatctttccattttctatgacctgtttgctgttttcagtttcctggctctatgatgtcatcacttgccagggaaccccacatgtggctcagctttccaggcacttgtttttcctgggtgtgggtgagctatcatggcagatttcatagccacccttaccagcttagaacttccccctttctcctggcttcccattttacatgtggactctgcctcattcaccagcttctgaggttttggagaaaataacccaatacagaatcagttcgtttcttgtattgacagccagagctgggacttgagctgtcatcaggttaattctcagcttcatgaagaaaaacttagcccagcacttcaaagcccgaaaaaaattaaacctgcctcttaatctaatgttccaaatttcagaagtgggaaaccctgggctcacataggttatctcagcaccccatcatcacttactagtacagagaaagatgtgctgctcttctcctggctcccaaggtatgaggcgttcacatttcctttgtcttaagttcagcctcttctcagaggtgagaaaacaataaacaaatcatctcatggactcctgttgagacacaccacatcccgtaccatggatggcgtcgttctgtcatagccgaagagtccaaaaaggtatctcaccttctaggcataactcaagggaaaaaatttt

SEQ ID NO: 263 - DNA, 2022 bp, Rattus norvegicus
  misc_feature: Incyte ID No: 213428_Rn.1
cggccgcggcccgggttctcgggcttctctcccgggccctcgacctccggcccagcgcgagcagcagtcaagaggggtggcaggatgaatgtgggcacagcacacagtgaggtgaaccccaacactcgggtgatgaacagccgtggcatctggctctcctacgtgctggccatcggactcctgcacgtcgtgctgctgagcatcccctttgtgagcgtccccgtcgtctggaccctcaccaaccttatccataacctgggcatgtacatctttctgcacacggtgaaagggacacccttcgagactccggaccagggcaaggcaaggctgctgacccactgggagcagatggactatggggtccagttcacagcctccaggaagttcttgaccatcacgcccattgtgctgtacttcctcaccagccttctacaccaagtatgaccaagtccacttccatactcaacactgtgtccttgatgagtgtgctcattcccaagctgccccagctcccatggagtccggatctttggaatcaataagtactgaggttgtagccccttccccagccaggttggcaggggaagggcagaaggcctttgctgtgacgctgaagacaggagcctctggacactgccagagatgggggttgccctgggcctggcttccccctcgcttcccccaattagccggacttggagtagcttgtagtggggttagggtggggcccttgggctctaacccattctgaagtttttgatcttttccttttgccttttgaatagagatgccatgggggtggtcaggaaagaggccgggctctctggctgactgtgggcctgagaagttgggacaggaagccaggaaaaacccctgttggcttgtttaccctcaggcagccatagcactttagcctccggaaagggggcagaaggacggtacagacttctgcattgattgccctcagtccttcagtatgtgaatgtgagactccgttcctgtctgtagttagagccctgcgcctgctgcctccgccccccagggagagtaagcagtcaggctttgtggactttcttgcaacccatgacgtggtaggctgtggatgcaggggagattaggaaaggaagatggggtggtgggacactctggaggtgggggacagagaagctgccgccttggtctctggtgagaggggagttcagagcaggggtcgggtggggatagtatattgggtcttagaatggacaagataggcagcagccagtatggatcaactgtccaccaaaggggtctgggagggagaagccagactcagcctccttttgagatgtgggctggaaggagagctggcgttgagggttaatttacccacagaatgatgctgatggggtaagggaggcctctgtgggtttgaaacccctgggttgcatgagggtgtgcacaggctggaagtaggcctgagagcactcagaagcagtctactttgacacttcccttagtggctgtgaggaagctttcagagaggctctgtccttagaaactcaacttgtattcttatgtagattgggctggggacagtgcctggtgctgtggcttgcgtgggaactggtcaggaggccacttccacatgcggtcagtggtctccacagtgtctaaggatccctgcccagacaaggcagtagtagggagcagctgcgggcacgtgtgctcgctcagcccagagtggcaggacaggtcatagatgtcccgaggctaggccagagaggagcagtctactacccctcgctggttcgagctggggcagtggttcctttggatagtgtggctgccccaagccctctgcccgggggccagagggaggtcactcacctgtttccacacctgacccatcacttcatgaacccacatgtatcatagagacatttcaccttctggtctttctaagcaaagtgtgaataggatttttactccctttgtacagtattctgaacaatgcaaataaagagcaccgtgtctgtttcc

SEQ ID NO: 264 - DNA, 1333 bp, Rattus norvegicus
  misc_feature: Incyte ID No: 213839_Rn.1
attgggtgagagcggaagagaatgttttaggaacaaggagttggcaagagacgccctagagagcccctagtccatgaggctcctgaatccagcttgacttcccacagcgagatctgccctctaaatctgggagccttttgtggatgggtgctggaaggccggtgttcctaaaacagcaggcagcttcccgcccacctcacccccaccctgtgtgcacaccaggagcatttgtacagaatactgggtctcttctgtcttgaggaaaggcagtgtcaagagtcacacagcacagcatgtaacgtcagctagagctagtcagtttgcattgttttgctgttggtagcgagagtgttttagtgagacttcagtttccactgtgtggggataagataagaatagctacaggtactttgaaaccactaacccttctttacatggggcgcacaggccagtgcacggtctttcttactaagatagctggtctggcctggccagcagtctgcacactgaagctgcaccaaagacaagcgaatgggtcacttctaaagagacgagggaacccactcctcatgggctctctcgggtgaagaataaagggtaccccagtggcctctcaccatcactgtcctccagggcccttgactttcagtcttcaaggcatgacatggcagtggctgcttcccctaccactagctgccccctcatggtagtctgggggacagaggtggtctgtgtttacaatgggcagtcaagaccagtcacccatattatgcatcaatattagacgaagccctgggctgaagggctagtgctgtcagctaggctagcttactctgggtttcggtagagtagtattggtttcagtctggtctcattcccattgccttaatgctgggtggtcagggcccctctatgagctctggatctaagctcaggagtaccactacagaagctatggatatgggtgtcctccgaggaggttctggtattatctgagacctagcgactaggaagaggtgaaggacttcacagcgtagtggatgggatgaggcgtgacacaccggcgtgagatgactcaatgggaatgtggcctcctacagaaggtaagccttgccatcagatacttaccacagcgtgtgacgactcagacttctcgtttatcctgatgcgacaccagtgtaggaccctataggatcacgatggaaactctaagatggttctgatcaactctagccacaggaggatgaaagggatcttttacatagcagggggttttatacataaatatattttgtttgtaatgagccattctcaataaatattctcaccatac

SEQ ID NO: 265 - DNA, 1644 bp, Rattus norvegicus
  misc_feature: Incyte ID No: 213907_Rn.2
gggccacgtatctttggagacccgggaagaccacggacctccttcatggcttccgcgaacacccggcgtgttggggatggtgccgggggcgccttccagccttacctcgactccttgcgacaggagctgcagcagagggatctcgacgctgctgtccgtggcggtggcggtactggcggtgctgctgacgctggtgttctggtagttcatttggcgccgaaagagcagtcagatcgctgtcctctttgtcggtctctgcgactctgggaaaacattgctgttcgtcaggttgctaacaggccaatacagagacacatcatgacttctattaccgatagttctgctatatactaaatgtcaacaacaaacaggggtaacagcctgaactgttgattgacctccccgggcacgagagcttgaggcttcagttcttagatcgctttaagtcttcagccagggctgtggtgttcgtggtggacagtgcaacgttccagcgtggaggtgaaagaagtggctgagtttctgtaccaggtcctcatcgacagcatggctctgaagaacacaccggccttcttagtagcctgcaataagcaagatatcgcaatggcaaaatcagcaaagttaaattcagcagcagactggagaaggagcttaaacaaccttgcgagtcacccggtctgctgctcccagcaaccctgggacagttccagtactgcacctgctcagctgtgaaagaaaggcaaagaattttgaattttcccaggtgcccctcaaagtggagttcctggtgtgtagtgccaagggtggactaggggatgctggctctgcggacgtccaggacttggagaagtggctggccaagatcgcctgaggagcatcgctgaccacaaaccttggtcatgtgagactgataaagaggccgtgtcgttgtttgtagtgtttcttcggtttttgaaacaattacaccagcttgagtttccctccccttcagctcctttcccaacaagtcctttttacttaattcccatgtcctccctctgttaggtgttgggtgtagatcccattagcttgagacatagcagagagggctatcaccatgtagagttaggggatcatcctagatagtccttgtctcctgcctttctgcattggtcccttttcctggggccatatcccgcctgattgtggtactagttaagttccagttgcccctctatgtttaggcattatacattgtccactctttagtgaagtctgggtatgtgtataggtacgttgctagtgaagatggcttcagataccacagggtctgaactgacagtgtgctgttcatgggctcagcgacctgtctctactccacctctaggttcaaaagctaaataatagagtcacctcacatggtagcttaagagctgaatccccagacagtcataggttagtgttctaagaggttccactgagggactgggagaacagcgcactgctgcctcgggtgtgcctgagctacttggttagctcctgttgtgtcacccacagctagaatgctgtggaacagtacaagactgaagatgtccactgtgcattttaaatacgtattcgttcatttttttaaaaatgttaccattttaaagtgatgctgtcttc

SEQ ID NO: 266 - DNA, 842 bp, Rattus norvegicus
  misc_feature: Incyte ID No: 214230_Rn.1
ttaaggcaacagcaagcaccagcctgtgaagattttgctcatcttttttatgccttttgacattgaatgacctatcactgtgtgcatgttacttagcgatcaaggagccccgcacctccgttgtgattcagcctgggaaaagagacctcctcccttcagtttataaattaaaagcaggaggggcgccatcagaaagcgtcgacaatatacatactataaatttttgagaaatatcaacatcgtgtcacatcaacgatgccaaattatgttcagcgtgatgcagaaacacggtggggcgaggaagcggttagcagctgtagaggaaatagctcagataatccagtcactttcgatactgtacttcagatgcgaaatggatattcgactggaaacctgacaaagcgcgcctgctttgatgtgaactggtatagacaatgaccagcggccgggtcagtgggatgtctctctgtgagcacgaaggcttatcaaatgacgctaaaaataagttcagccaccgtcacttgggaagggagaaggcgaacatttcatgtttgggcgggcatgtgtgtgcacaagatggaaagagcgctttagagcatcctcatctaattacccacgttgtgctctccgtgataatttctcaaggactgcagtgatcctcttcactcgcgtccgggtctgtggcactgctccaagaagccttacgcgcacacacaaattagcaaatgcacacacacacactatagcttcgatctttttgcgatacttgatttatgtcactgactggctggatccagaagtcacacctctccatattagtgaataaaaattttacccgtgtc

SEQ ID NO: 267 - DNA, 1570 bp, Rattus norvegicus
  misc_feature: Incyte ID No: 214341_Rn.4
ctcctcttgcaagtaggcttgactccataatggttggaacggcatcttagtcaagcccttttggccacttttctgaccgcagcctctcgtgtgtcttgcttacctaccagcacagcagggcacccactccagtgcggacacccatgtggacacccgccatgtaggcatcccatcatcatagacttggctgctttcccgtcacatgcacagagcagtgctcacactcacttggcagagtgcagctgtggccccaggtagactacagccacctggtgctaggtgcctttgggcacctgagtggctcaggaggcctctgggtgctctgggcctttgggtagcccagtgggtcatggcttcttctttggccaacctggcctggccaagatgacaggaactcatccgggtaactggccattcgttctccatgcccgttcctccggtcattgagccggccacggggagcatcttgcaccaggcccaccgggaccctgactgaactctctccttgtttttgtctcccgccccaccagaaggtgatgcttccgtcgggagctgccttaccggtggtttcagtgatttcagtgacggaccgggaacccaaagctgccctctccgtgcaatgtcacagcccgcgtggtctccggcaagggattcgggcgaagacaaacggatgcacccgtctttagaaccaaaaatattctctcacagatttcattcctgtttttatatatatatattttttgttgtcgttttaacatctccacgtccctagtataaaaagaaaaagaaaaaaaatttaactgctttttcagaagaacatcaacaaacaacaagagaggtaaagacgaatctataaagtaccgagacttcctgggcaaagaatggacaatcagtctacttcctgtgtcaatgtcaatgttgtctgtgcgggagatgctgtttttgtgtagagaatgtaaattttctgtaaccttttgcaatctagttactaataagcactactgtaatttagcacagttttaactccactctgattttaacttcctttgattctttccaaccatgaaatagttgcttagtttacctggagaatccactcacgtttataaaggaaatgttagatcgcaccgtgtagaagccccgctctgcacacgtgaacggatacagaggggccagagcccactgggactgggagttcctgacccaggcccgaccatgtcgcacccatcgtcccctgactgggacgcccccgccccaacagtgacggatttttggagagatgaaaattctattcatttgttgatccgctgagatctggggagcccacatctcagtatttctgatcctggctacttcccctagaaaaaatgagccctctttttccagccttgctcacagcagcagaagaaagggcttcttattcgtggtcacctgctggtaggggatagggtgacacaaaggggccacatgccagtggccagctacctgctgaggaacatgctgtttgtattgtcttaggagaccacgctgttttgtgaataaaactgaatgcatgtttgtgtcatgataa

SEQ ID NO: 268 - DNA, 1201 bp, Rattus norvegicus
  misc_feature: Incyte ID No: 214420_Rn.1
ctggcgggtactgggttgctgctgcaaccattcgtgctaacccttggttttccatgttggatttcttatctgacaagccttttatcaagagaatgatttttaagctgttcagtcaggagacagtgatgaagtttgtaccacgatatagcctggtcctggaagtcagtgacagtggtgccttccggagaagcctgcatgatcctgatggacaggtggtcacctatgtgagtgaggcacatgaacacgatggatacctgtacctgggctccttcagatctcccttcatctgcagactcagcctccagtcaatttagccagcccagcagctgcccacactgtgcatgccaggaatcatcacactcagtcatataggtctggaaggagccatggacatagctctcttctgtgtttctgctagtccttggaagtgtgcaagtagctgctgcaacctgggagaacatatgggccttacccatactttctcccaagaggtgtctctcacctggactcaatgtcacttttagagggaaatagtgtatctgctatggggaagacaaatcatggaaagccatttctctttaaaaaatatgctaagttacataggattctttagtacttggaaagtttaatacacttgtcacagagctcagggtttgatgattagagcaggggattagctctatctgacaccttctgtatcttcattctaaagtggggtcatgcttttaggggtggtgtggcgggtgccatggaagtggtaatgcatgtgttgatgcagggattatgcaagctgaaacttgttctcaggggccatgtcagatgtgtgagaatacctggactcctggttttcctccatagtaaaggggtgttctcccactctctacaagtctcttcatgccagagggttattcaagactcccaatttagtggccaggaggatttcatatgggtttctattcatgtgaatgcattatccactgtaattgtggtgaccacagcgagttttggacctgacccaggggtgttttagagatgcctatatatacggcatgattcatatagaacccacagatgtagaattagcgaaaatgatgatgtaatagtttagtgctaatagtaataagctccaagttgcttatttcttggcaagtatgtttatatactggtcttaattttgataataataaatcatattaaaccc

SEQ ID NO: 269 - DNA, 1495 bp, Rattus norvegicus
  misc_feature: Incyte ID No: 214422_Rn.2
cttgctgtgtgacctttgggtaggtggctccgtctctctgagcctctgtttccccctctaagctcaacaaacaccatggctgacgggcaattgcctttcccgtgctcctacccaagccgcttgcgccgagacccctttcgggactcaccgctctcttcccgcctgctggacgatggctttggcatggaccccttcccagacgacttgacagccccttggcccgagtgggctttgcctcggctctcctctgcctggcctggaaccctaaggtctggcatggtaccccgagggcctacagccacagccaggtttggggtacctgctgagggtaggaaccccccacccttccctggggagccctggacagtgtgtgtcaatgtgcacagcttcaagccggaagaactgatcgtaaagaccaatgatggatacgtggaagtgtcagggaagcacgaagagaagcagcaagaaggtgggattgtctccaagaacttcaccaagaaaatacagcttcctgcagaagtggatccagtgactgtatttgcctcactttctccagagggtctgctcatcattgaggctccccaggtccctccttactcaccctttggagagagcagctttaacaacgagcttcctcaagacaaccaggaagtcacctgctcctaagacgtcagccttggtccttctttgctccaggcgcctgccccagggactctctgatttgagggtagacgactttagcagcactcagatttaaggcaactcagatgttgcggggatgggagggagaaccaaatgaccatccctggataatgtagtagtagatttctccacagggtgacacaatgggcccgcctcgcttggttgccttaggtcaaagtattgggaggtttttcttcaccttgtctgggtgaagacaccacacggtctatagttgcaaaacaagcaaatggggactgaagatttcatgttacatttttaccttgcagctaacgcaagacttgcttttctctggggaccttcccaccacccagatcccctgctctgggccctccttatatgtggcttggttgatgggactcattggcttacctcagtgtgtttctaaactctctgtctagaagaggttatcagataggtcttatattcccatatgggatttatccacataaaacacagtctggatttttcacagcatgaccccatggctctcaaaccatcaccaccaaggactctgggagcccctcagttaattctccggctaaggtcccctttattgtgtccccctgtgtccaagtcaggtttttacagtagagctgtcttcaggcagctccaccaggaaccaagcaaaggtcagacagcctggcacgcaggctagtggtattgtgtatgtgggggtgggggtgtcttcattgtgtgaattgagctgttgtttagggcggaagcatacagacgtaacattaataatgttcataataaaggagctgatgttctt

SEQ ID NO: 270 - DNA, 1411 bp, Rattus norvegicus
  misc_feature: Incyte ID No: 214563_Rn.3
aagaaagctaaatcaggcaaacagaatccaaagaagttacattgtcaggaacttaaaaaggtgattgaagcctcagacattgtgttagaagttttggatgccagagatcctcttggttgcaggtgtcctcaagtagaagaagctgttatccaaagtggatgtaaaaaactagtacttgtattaaataagtcagatctagtaccaaaagagaatctagagaactggctaacttacttgaataaggaattgccaacagtggtgttcaaagcctcaacaaacttaaagaacagaaagaagacattcaagataaagaagaaagttgttccattccaaagtaaactctgctgtggcaaggaagcactgtgggaagctccttggaggttttcagcagtcctgtggaaaaggagttcaggttggagtggttggtttcccaaatgtgggaaaaagcagcatcattaatagtttaaaacaagaaaggatttgcagtgttggagtttccatgggacttacaaggagtatgcagattgtccctttagacaaacagatcacaatcatagatagtccgagcttcattatctcaccttgtaactcccctgctgcacttgccctccgaagtccagcaagtattgaagttctaagaccattggaggctgccagtgccatcctgtctcaggctgatagtcaacaggtggtgttaaaatatactgtcccggggtataaggattctctggattttttttactaaacttgtctcagtagacagaggtcttgcacctatattaggtggaagcccaaatgtcgaaagtgctgctaagctgctatggtctgagtggtacaggtgcctcattaggttactactgccatccccctgcatcctggaatcattctcctcattttaatgagaatattacagcaatcatgaagaggggctttaatctagaagaactagaaaagaataatgcacacagcatacaagtcctcaagggccctcatttaactaataaaatccttttccggtcttcgggcctgacaaatggaatatctagaagaaaaggacatccccgaagagtcaccaaaacagacagaagaccaacaggatggtgatgatcaagaacatgttactggtgaaaaaaatgcagagatctcagatgtgactcctgtagaagagaccagggagatgtcacctgggcaatcaacagcaagtaaaccatctgacagatcctttatcttggataaaatgagtgaagaagaacgatgcctatgactttacacacagattatatatagccttctaaatgttcaagtgtgctctgtaacagtgtttctagattgctttggtatgatataaagtgtaaatcttgtgaatatgtatcatgttctaaattaaaaacaaaataaaaagtgtttgtat

SEQ ID NO: 271 - DNA, 258 bp, Rattus norvegicus
  misc_feature: Incyte ID No: 214851_Rn.1
tgacctaacctccaaatatgagaccatgtatccctatattcattcaaaccacctacactggtggagcgcaggacacaattttaatggggctatagagtacagaggtagatgtattttttctagtcaactggcctacagtcacaattattttacccccaggaatctagctgacaagacgtacacttattccaatgcaaccaccactttgaagtactaataatctataactctttaatatgggtccttaatataaataga

SEQ ID NO: 272 - DNA, 1766 bp, Rattus norvegicus
  misc_feature: Incyte ID No: 214987_Rn.5
tgcgacattcgtaactctgccatgtttctgttaagacacttaaagtccagcatcaagcaaccaagtttgagcggcagaaatatgtgcttttcctgaccttaattcagatcctagagacctggtagtcacctaactgctccctgccgctcccaggcaggggttccttccttcctcatcagcctggctttgaactgcaggcacatcaccatcgggcatggccaatgtggagctgagtgaaggcaccatccaggtgcggggccagagtcttttcttcagagaggcccggcctggcaatgggcaacctcgtgcgcttctctgtgctgctgttacatggtatccgcttctcctctgagacttggcagaacctgggtactcatgcataggctggctgaggctggctacagggctgtggccattgatctgccaggtcttgggcgatccaaggaagcagcagcccctgcccctattggggaactggcccctggcagcttcctagctgccgtggtggatgccttggagctgggatccctagttgtgatcagtccatcattaagtggcatgtatgcactacccttcctcgtggcccctgagtcccagctccggggctatgtaccggtggctcctatctgcacagacaagatcaatgctgctgactacgcacgtgtgaagactccgactctcattgtatatggagaccaggaccccatgggctcctccagctttcaacacctgaagcagctgcccaaccacagagtgcttggtcatgggaaggggcagggcatccctgttacttggacaagccggatgagtggcatacggggcttctggacttcctgcaggagctagcttgagactgagtccggctgatagggacgacagactgactgcctgctctaggatctcttgctgtcttctggtctctggcttgtgcctcacctgcaacaggtctgtctatgcatctgtctgtcttgctgtcctttctgcttttctctcgcagtgacagatccgatccagggggttaaatccaggtgggaaaagccttggattcaaggagagatctctgatttgtgggtaatcccatgagcttctcctacaggcttccgtcttggctctcactcctgccttagtgttactttcctggtcctatctccctcttgatgctgctcttatcagagaagtccattccttttgctccctctacccttgaaggcctacatataacacgagtgtatgcttgtcttagatgttatcccactacctctaaactagaacctctccctttgggagcagtcacaggggtccacatgattggccctaatgcctacgttcttcgtgtagcattgcatctcacgctgacacatggtacatgtgctgttcccccgaaacgaaaggaagggagcccttttaagagattcatttgccagaataaataatgtaagcatcccctaaggaagggagcacttttaagagattcatttgccccaactaaaaatgtaagcaccccttagctttctcttactaccccccttgcaatctggtcccagatccagaattgcttcctcagaagggaaggtgcacctctctgcttttcaacgctccccgtttttcttgtatcccacttcttcttggggggctgcaagcctcaccatggtcatcaagcatgaatcttgctcagccacagcccatttcctgtaactgaggtttgggagtgggatagggagaccgactacggaggtccctggaataaagtgatacaattagacctc

SEQ ID NO: 273 - DNA, 1826 bp, Rattus norvegicus
  misc_feature: Incyte ID No: 215088_Rn.1
ggggagttttgtactggggattgagcccagggcttcacatgtatgaagcaagtgcttaactgctgacctaaaccccatgaccttagttacgtgatttttaaagtacagtctctttttgtaaaggaaaattagccccagtcctacctaaatgatcacagtttgtgactgttagctgaattaggcttatctaaatttcattttgataattttttattttgtgcataaatgggacgacattgtttttatggagtgtgtctctatgaactacctaatcactattggcttgatagaagtgctccaagcctttttaaacttggaaatgtaacttaagttaatgagctttaaaccatgcatatatgtatgtgtatatacatatgtatcatgtaaacaagttagcagcatctttaccagcctttcctggaatatttatgatgccactaaacagtaatagcatgagagacaggcccacagtctagactgggttgagttttgattaaacttcttcagccataacctgaacagaatcaggtcccatccggaagttatcagactgcaggcctgtattttgtgagccaacagtaatatttactgccagccttgcataacaatgccctttgtgactgcatgtgacttttggtagctgtagtttatgtctaaaagcagttcgagttttatagaggtaattcatgattatttggacaagcagggtgggtaaattcaagtatatttaaagtgcaattaaggaaattctagggcataatgtctccagtttaaaaaaaagtcaaggatttgtagaatgtcatagaatgaaaaaaatattgaggagactttttaaaagataaggtttatacagtgatttttttttttaattcaaggtttgctactttgtgttaatttaaattttcaaagagacaccgaagcctcctgggaaagaattgcattgttatttttctcctgctagtctgaatgtgcattttcacagctaaaagtctcttgtaaataaggtttgttaccaaatttgaagcccattttttttcataagtggagaacatttttccagaattaaagagacacagacccacagtctacacaaagaaagaaagagtacctggtgccttctcaaatacttgcagagtagccgtaaacgtgtgttcaaagtctgctgcccccagctcccccgttggtcctgagacctgtcccacagggcggtcacgtggtttgcttctgccttttggttccacttgaccagaccttacagcgtcaccattggaatgtcttcactgaatgcattttctgttcatttgtttcactttgtaaagccatcccgggaaactatttggctgccttcttatgcttttagaaatgaatgcaattactagcagtctttatattttaaagtttataaagaaaagaaatgcaaagctaaggaccggatctaattggatctcattccctgtttgctattatggcagcactaggtatgtaagccttgtgtagttttctcttgtacaaaatgtggataataacctacctcacagatgtgtgtgagaaaaccgtattgaaggcccataagataggggtttatagtcccatattcaatgtcaatctttcattttataatagaacacactattgataatgatagaatgagtatcattgaaataaatagatgataaatatgtaataagggcatagagatgaagaaatgaaaaagacacagtttcacaaatcataatattcttactgtaagacacttcagaatttcttgaaaacctcaaatgtttaaatatcagacctgtcttttgattcaataaatattgttattc

SEQ ID NO: 274 - DNA, 629 bp, Rattus norvegicus
  misc_feature: Incyte ID No: 215095_Rn.1
agaaaactgccggactcacaggaatgcgagaaaatatctttgccagacactcgtagaaaggggagggcagttggaagaagaagaaaagtttttaaatgctgaaagttactataagaaagctctggctttggatgagacttttaaagatgcagaggatgctttgcagaaacttcataaatatatgcagaaatctttggaattaagagaaaaacaagctgaaaaggaagaaaagcagaaaacaaagaaaatagaaacaagtgcagaaaagttgcgtaagctcttaaaagaggagaaaaggctaaagaagaaaagaagaaaatcatcatcttcctcttcaagtgtttcttcagccgatgaatccatttcttcatcctcatcttcttcctcttctagccacaaacggcataagaaaagtaagaggaatcgttcagagtcttctcgaagttcaaagaggcactggtctaagacatcttcaggctacacagatcaaagtaggaaagatgattgctatccagttccaactaatacctcagcatctttccttaatcaaaagcaagaagtggagaaacttctggacatccaggataggttacagtgtccaaatgcacaggtgaaagagaaagagaaag

SEQ ID NO: 275 - DNA, 996 bp, Rattus norvegicus
  misc_feature: Incyte ID No: 215255_Rn.1
  unsure 234-257: a, t, c, g, or other
ctggggggggggtacttttaaataaaaaaatgtctgacgatatttctaggaatgagcaatccctgtgtgcagtctattagtgtacagtcctcatggccccagtcacacttaataaggggcttagtgagaaaactgccaatggattctaagttcctcgttagagagcaccccggaagtacatcccacacatccaggatgcactgcaaaggctttaagaccatgagtagctttgtnnnnnnnnnnnnnnnnnnnnnnnnctcacgaagtagatttctaccttctcaatgtgtttcccccaacagttcctttttttcctggcaagtcaactgtcaagaggagatcaaacacccctcccccaaaagaatgaatatcttggcaatctttcttgtgtgtctttttatggagatagcatgacccgagcaagtagtgacctttgccatcataggaatcactccccaggcacatggttttattggacctttgcaacacagggcaaaggtggcccaaggtttggtcccctcccattagatggcaggctgagaatggtgcttctggtgtcatctgcccattcaaccacaatacattatggatcttataaatcgagagtcctgctctttagccgtcctcaatatggttcctccacaaaagcctgggtttcgtggctgagtccttgttgaaactgagttaattagcatcctcagctctcctcgggtctgtctctggtaaacactgaagggaaagcccgacagaggatgggtgtgcaacaatccccatgaaggttcacagtacagaggaagtcaaatattccagaacactctcgttgaagaaaacgaaagaaaaggaacatttatgaggtagttaaagtgcccagacctggagcagccatcttagagacctcctcactgaagtaagatgcagagtcttctggctccaaattattctcagatttgagggcgatgtctgttctgttccatcatgctgaggccctaattagct

SEQ ID NO: 276 - DNA, 1061 bp, Rattus norvegicus
  misc_feature: Incyte ID No: 215445_Rn.1
ctagaatcctgtctcttgcctgcagccccaatggggcctctttcgtctgttcagccgcagctccgagccttacctcccagccagattcctcagccccggatatcggcagcaaaggcatgaaccaggttcctggcaagctgctgctgtgggatacgaaaaccatgaagcagcagcttcagttctcgctggacccagagcccattgccatcaactgcacagctttcaaccataatgggaacctgctggtcacaggggcagctgatggagtcatccggctctttgacatgcagcagcatggatgtgctatgagctggaaggcccactgtggggaggtctactctgtggaattcagctatgatgagaatgccgtgaacagcatcggcgaggacggcaagttcatccagtggaacatccacaagagtggtctcaaggtgtcggagtacagcctcccttcagatgccactggcccctttgtcctgtctggctacagtggctacaagcaggtccaagttcccagggggcggctgtttgcttttgactccagagggggcacagtttaacatgcgtgacgtgctcttgccacaggggggcctcatctacaagctgggcagtgaagagaaagttctagaaaactgtctgagcctgggtggccaccgtgcccctgtggtcaccgtggactggagcactgcaatggactgtgggacgtgcctcactgcctccatggatggcaagatcaagctcactaccctctctagcacataagctctgatttccggcctggagtgacatcactggaaacagaattgtctctggcagaagagagatgagacgggggacaagacagggctctggttcaagccagggctgcggatcttacaggaaagaccaccgagggggctcggtcatccaaacgcagctcctggagccaggagttctgtgcagagtgcgctccagcgcacaggaccagacgctgaggaaggagccacaactggtgcaccgtgctcagtccaagaggctttgactgtataacttgacatgaattgcttacttttctcttttta

SEQ ID NO: 277 - DNA, 348 bp, Rattus norvegicus
  misc_feature: Incyte ID No: 215529_Rn.2
aaggttgctgatctttctccaatcccggtggtgctgtacagtgtcccaggcaacacgggtctagagctgcctgtggatgccgtggtcacattgtctcagcacccaaatatcattggcttgaaggacagtggtggagatgtgaccaggactgggctgattgttcacaagaccagcaagcaggatttccaggtgttggctgggtcagttggcttcctcctggccagcaccgcctcatcgagcccaacactgcggtgacccggcgctttggaataccagggctgaagaaaaccatggactggtttggctactatggaggtccctgccgtgcccccttgcaggagttgagcc

SEQ ID NO: 278 - DNA, 1138 bp, Rattus norvegicus
  misc_feature: Incyte ID No: 215695_Rn.1
gtgaaccccccactgaggaccaccttctgcagaacaccctgtggcctgaggttcagaaactgtatggacatggctatgagatattttgtgttacttgtaacaattcaaagactctacttgcctctgcatgcaaggcggctcagaaggaacacgcagctatcattctttggagcacgacatcttggaaacaagtgcagagtcttgcttaccacactctgaccgtcacacagatggccttctcgcctgatgacaagttcttactggctgtttccagagatcgaacctggtctttgtggaagagacaggatgtgacctcagcggagtttgatccgttttttagtctttatgcattcaccaacagaatcacttctgtgcatagtagaatcatttggtcttgtgactggagtcctgatagcaagtacttcttcactggaagtcgagacaagaaggtggtggtctggggcgagtgtaactccagctataaccccatggagctaccccattaatccctgctcctcgtatcctggatgtggtgcagttgtgtgacagtctgtcagtgttcttgccctgtgcttaacccagcccaaatgatacattgtggcatgttggattggagagtgggaagatttgtatatactcctggagcaagtaccaatcaagaaaccaaagactggactagctgtatagaaacaactccaagccaaatgtcacacgctgggtatcacgaaggttatgctggaagagctgcatgcggcagcatctgagcagagtgaagaggggaccgagtggttggattttgcaagctgtggacgaggaccatactgtgaagatttatagggttaacagatgtgcactgtgaaaacttgacctgcaccctgcctgtcttgattgtcttaaacgtttgttatgtaaatagatcgccctttccttaccttagtgattgaatgagtttccctgtctactatctgatataggtcacgggctctttcccttgtttaatcgcatgtatgtaacctcccagaaccttacccatgctgtgcagagacgcttgggtctacctctgtgtgtttcagattaagaacacttttaatttgtgcccaaatgtgtctgatttttgcattatattgagtctttggct

SEQ ID NO: 279 - DNA, 1624 bp, Rattus norvegicus
  misc_feature: Incyte ID No: 215750_Rn.1
gctctgtatgtgccagccctgaggttgcctttgattgatgacgtttgcctttcttttaggtatcaaaacagtgttcgcagggtccagctgcaatgacattgtttgcactgagcaatgtgtaatgagtggacattttgacaagaaaattcgtttctgggatatccggtcagagagtgtggtccgagagatggaactgttagggaagatcactgctctggacttaaaccccgagaggactgagctcctgagctgctcccgtgatgacctgctaaaaatcattgacctgcggacaaacgccatcaagcagtcattcagtgcacctggattcaagtgtggctctgactggacccgagttgtcttcagccctgatggcagttacgtggcagcaggctcagctgacggctctctttatgtatggagtgtgctcacgggggaaagtagagaaggtttctcttccaagcagcacagctcttctatcagtgcggtggcgtgggccccctctggcttacatgttgtcagtgtggacaaaggaagcagagctgtgctatgggcacagccttgatgccactccctgaggagcatcgtgggatcccgcagcccattttggagaatgatgtgtcctcccagagaagagctgaagctatatggcacccaccgtacctttcctaagaactttgacttaaggtccctaatgggtgctaagaaccaacacagaaccaaactgactcgcacgtccctagcaggggttccggttcttgtcgcatgtgggtgagaaacactactaactctgaccttccatacctcatggggagcacagggtccctgctgggtctccccactggacacagtgccaaggacagccccacacatcgggtattgggtcccctgtgcttttcccgtctttccaaagtctgttgtagcctgatgcacaccccttttctgtggggtcacttacccagggggctgttttcagggctggtgatatgtcttggtctcactgctgaaacctgcatcttgagctggccttcagaactccgagctcccttctctgccaacacctacacatagctttgtgtgtgcgaggaaagaaactgtgccaacctttccctgtccggtagaatttgccgctgaaatgagaaacacatcctttacccagcatcactgccagtcacagcagtggcttagcgctcatctggagctggtggtggggagtccagccactgccatgaatatacagtgtagtgtggggaagagaagcctatcgtgggagctggtcgtgctgaaggctgggaaaagcaccctctgtcctgcttacccatgcacacggtctgagcacggtgtctgggtgtccaaagcaccacgtttgtcacatttactttgcactttattggggggcttccgcgctggctctctggacagtaggaacagacatgagttctagaaactagggaagagggacagcagtcccttccctgcttgcaactcacctgtcattcgctgccagagagctagtggtgttgggagttgagagtggctggccagggcacatcttttatttatttacattatgtgtcccaacagaacttgactgtaaataacgaagaaattctgttatatacttttc

SEQ ID NO: 280 - DNA, 2105 bp, Rattus norvegicus
  misc_feature: Incyte ID No: 216114_Rn.2
taccattccaggtactcagaggtttccttcttggagctggacaaattcctagaggatgtcaggtgagagctggcatgacagtgaagaaaaaacactatcagacccgagtccccacctacctaccccctgtctatctccaggaatggcatctatccactcatgaatttcgctgctgctcggcccttgggacttcctcgtgtgttggccccacccccagaggaggcccaaaaggccaaaactccaaccccagaaccctttgactcggagaccaggaaggtggtccagatgcagtgcaacctggaaagaagcgaggacaaggctcggtggcaccttactctgcttttggtgcttgaggaccggttacatcggcagctgacctatgatctgctccccaaccgacagtgcccaggacctcgccgccgaagctagtgcactatggcttcctgcacgaggatgaccggacaaagctagcagcctttctggagaccacttttctcaagtaccgtgggacacaagcgtgacctttccagtcctgacagcccagcagagataccaggactcagggttgtccacttgtcaaagagccccacacgtgctcaaagctgccttctgcctgtgttccctggaactgaatacaggtcttgctagtgaagacccctcccccacagctttctgcagcagtgtgggaccctggggtggtgatggagccctgagcctggatgggagtggatacaggtcagttaggggacccacactctatctggtactggacaacagccatgccttcaggtggcagaaacctaggaaggagcctggtctcaaaagtaatagggcccttcaggtgtcagacacagtgctgggcatcaggcagaccaaacctgacctgattggagactcatagattagagagcttggagttagacctgtggccaggaaattccatggtcaccgctcagaccagtccccggattgccttgcagacctgccttgagccgtctctctgatctttcacacatttgagaccaggacctgtgtcctccacaaagcccttgggtaggatctttctgttcatcaaccctctggcctaagggctcagaggtcaggcgtccactgcatcccctccccggggaagtcaatgtgtttgagtctgaggatgtgggttcctctttctccttaacccaacttgtctctcattcttgctgatttcagagtcctggtaaattcttcccctcagaaccaccctgatttcttggttcttgaaccgcctcctctcttccaacttcaaatttaaggtcttaaacgtttttaaatgtgtatatcaatgtaatggctccacgttccttttgaaaccttcacgtgtgaaaccaggaaggctcactactgtactattaatagttccacatgtgctgctgttatactacatatcattagacccagtggtttgagtaccaacacacatacagttctgtacatcataaagtttaatactagattaagacccaggctaagttcctttctggaacgttggggctctacctcctgctccttcaagctattggcagaattcacttccctacgatggtaacggtagcgattcctgttttcttacagctgtccaactcagagcccttctcagcttctagaggccaccaatttttcttagctcttcttctatccccttcaagaccagcagcatctaaggtttgtcttgtcatggacgtaactgtctggttcggcactgctggggagtattacggggccttttgtgacgattaggatatggactccacactgggtaacctgggatgatatccttctacagggtctgtagaattaaccacatctgcacagtaccttttgctactggagactaatcaatcactgggtcttggtgtcttagagagtagaacgatggactggtggatgtcgttactatgttgccttccatgccacctgtagcccaaaccaaaacctataatatagcaaagttgtcatgggacatttaataaattaaatgaactctcattgtgcatggtctgacatagtctatttttaaaatccacaacagattgtacagataattaaactgaacttgtaagcagaac

SEQ ID NO: 281 - DNA, 2421 bp, Rattus norvegicus
  misc_feature: Incyte ID No: 216152_Rn.2
  unsure 885: a, t, c, g, or other
tgaagacctgctacggggggaccttcctggtgcaccagtccttcctctacaagcgggagaagacagtaggaagcaaggtgtactggacctgccgggaacatgcggtccatggctgccgcagccgtgccatcacccagggccagcgcgtgacggtgatgcgcaccactgccactcacctgacatggaaggcttgcaggcccggcggcagcaggagaagaccataaagaagatacaggcaaggcggattggggctggggacctggaggattgtgatgacattgaagacacactgctgcaaggggtggacagcctgttctaccgcagagggccaggcacactgactctcagtagatccaggtccaggaaacgagcaaagaagcagcaggaacccttgcaggaatcccccgaggaggaggaccaggatgtggaccccagaggcccagagttcctgaagacccctctggggggcaacttcctggtgtacgagtccttcctctacagacgggaaaaagtggccggagagaaggtgtactggacttgccgggaccaggcacgcatgggctgccgcagccgggccatcacccagggcaggcaggtgactgtgatgcgaggccactgtcaccccacctgactttgttaggattggagactctgaggcagcggcagaaacgcccaggccctgctcagtgggatggcccagaagggcctgagttcctgaagaccccttctgggggtgcagcttcctggtgtacgtagtccttcctctattaggtcgggagtaaagcgaccggtcgtataaggtgtactggacttgccgggaccaggcaccgcatgggttgccgcagccgcgccatcatcccagggccagtcgggtgatggtcatgncgcaggcactgccacccaccagacatgggtggcctggtaagccctgcggcagagggagaacttcccttaacctgacccactgggaaggccctagagccctgtgcagccgctggagttcctgcagacatcaccttggaggccgcttcctggtgtacgagtccttcctgtacaggaaggagaaggccgccggcgagaaggtgtactggatgtgccgggaccaggctcggctgggctgccgcagccgcgccattaccacagggccgtcgggtcatggtgatgcgtaagccactgcctattcccctgtacctggctggcctggaggccctgaggctagcgggtagagggtagaagagcccgggagtagggagaaggcccgggagtaggtagataggccccctagtgctagtccaagaagaataaagtatagtaagaagaagaagttaaggatcaatcaaagagctgtaacacgaacagcccaatcctgctgcagtatcttatcctggatacaacagagtgagcacgcgggcacccacaggatgaccttcccatccacacatgcgcgttcccatccacttcagatgactgcttggtgacaactctttccactcttccaaacacccaggaccgtcacatttcctcagaggtctccccggaggagcgcttggactttgggtggtaaccaagccggatggcgaagcatgcaggcctgccccatgctgctctcaccgtgacctgagctcgtggagacgtgtgtgtggacttgatagacctctgcccaatctgctgttccagggcctcagcaccatctggttttcagagcatgctgtctgagcttttccagtggggtgtgaccctgtgcgagtgagcatgaacttcagcgaaatggaagtcatcgccaagtcaggatatggtacggggacttcctgccactctctgaagacagtgcaagtcatagcagggtttttgttttgttatcttttagggacaggtgtgaggccttcctggtcttttgtcacttgctgcttactaaggcacattcagccctgaccgtggcagagcaggccaggctgaaggccttcgctgtaccttcctggccgactttgcatcctgtgttctttgctaccgttaaacctactgtccacagttcttgcggcgccagccagcaggtcaggaggaggtgacaccaggtaggcatgctctggtggcagcagcaccagcgcgagagttgcccacctagtgtcacatgatacacccaggtcagtaggtggcatcaagcccacctcctgtagaagaggctagcaggactaaggagccatgttagcagtggcatttctagtgtccctgggaaagcaaaatttcctgtgtgctgcccctggccaaaactgtcctcaccctgtttcaaaggtgcaaggtcctctcccttagcaagcaagccatggagcagccacccctgtgggatagtaatggcctggtgcctaccactggcttctgctcatctgcttccctcaataaaccctatgtagtctcacggtacag

SEQ ID NO: 282 - DNA, 2048 bp, Rattus norvegicus
  misc_feature: Incyte ID No: 216353_Rn.1
gcctgagtgtggctcttctcgttgcgccccaagacctggcactgcctatcgctcaacaactaagacggcaggtccgtgctgtctcgaaccacagaaacctaggagaactccacgaagcacccttatgctaagcagctcccagagctgtccagccacgccggatcccctcccccaccgcgccgacctgtcccgccttctaacctcgaccccgatgccgtaatgatccctgcaacagcgcgctggagcgatggccccccagggcgggacccacgggccaccactgggggtgactcttgagcctggattaccagggaaacccttgcacaaagcacttcctgtctgaggacgaacatgagccacccatttgctcctcgactcacgcctacataatgaccaccccgtattgcagtcctcctctgtgacttttcccgaagcctctgccacctactcaggagcaccttgccccgagctgcttctctggcgctatcccgggagccctgattcctgaggccctccaggcttgctgaggcttgggggataaccccaagtccccttactactcttgcggtccccagctgggcgagatcatggagctctgagtgtcgatggacctgttgtccctccccaccttctttcctgacttatagagaccagcaactcccagaaagggatgaaaggcgcttctgccaaacaccggtgccgtggccatccaggaccttcccctgacaggaggacactgagctcggtggaatagactagattggaagcagcctgggaagagaaggtgtcaccccattagtgaataaagacctgtgagcagttgaaggtttctcagcagcctctggggagggtggggtactggaagctggggttttctccttaaaatcttccctggaaaacggtgagggcaagccaggtcctggcaggctgggctccaggcattgagaatgtgtgagtcagagcctcgcccccgcccccgcagtggccgactgactccctccctccagttctggggagtcaaactagggatgaggccatacgccaaaccatttaaagttaaagattcttttattaataagtctccctcccctccaaactttatccccaaaataaatatcacccccttgggggatgggttgtgtttgggtgtactgggaccagccctcccaaagggccatcccccttaatgttatgaacaggtccctaaatttaacccagtcccaggtctaaaactcaggttagtggcatttcagtccatccgagttgggtggaacccagtgttgtgtctgcccctcaagtcggccaggcctccaggacttgtggggagcaagagattcccttgttgcaaatgctgcagatccttagtatgagtcgctttgtgacctagcttgagggctctctgtctgccccagaaccagagacagggcaattagacaccctggaaggctcccttgaaccctaagcccagtccttggaggtgaatcaccacctcgccccacccccttgtggttggaagagtctggcgcggcttgtctctggaaagccaggctggctccagaatgaacgaatggacgatgaatgggcaccagcgcgggtgctcctcactggatcagtgccacacctgggcagccttctccaccagtctcctctatgggggtagtaaacttttctctccggcggcatcgtctccagaccaggaaaccagaaaccagcgccaaaaccagggccagactaagagcgcctcccagaatgggccatagcatcctgaaaggggcaagaaggtcctccggcgcatcccagccagaagtcgctgtgtggtcgcgctggacaagaagcgcagtccatgcacttgtcgaggtccgcgctccaggagctgccgcttgagcatggggcgttgcctggggagggggctgcaggtcagaagctggcggctgggtgcggctattctgggggctggtgcttgctccccggccgtggcgcgtatcaacaccaacccgaatcccaacacgaggagctgcggcagaggccgcggccaacccggagccatg

SEQ ID NO: 283 - DNA, 1389 bp, Rattus norvegicus
  misc_feature: Incyte ID No: 216555_Rn.1
ctgaggccacttgacagactgctgtcctgggcttgctcaggtccccactaatattttaatgtgccaatgcctgtggagtgtctacaggtctaagtggcagccatctcagtgaagatgtgggccaaggatagttttcatacctagggcctatacccaataacagaatctgcccgcttgtctcagcggctcacttccctgagctatgagcaaagggacttcgatgccaaaccagactttggtcccttcctgagccctgccccagttatctctaagtgccttcccttttgcccagactgacctgacccatgatgtaaggaccgtaggggagcaccaccactgcaaaggctgactaaggtctgttgggctaaaggtctctgttgagcccagtgtctatagtcacaccttctttgctctgggcccaggaggcctacttcttctttttctcgtggaatcctggaatcttaaagataaaagaacctagaaagaaaatcaaacccactttccttgtggggcagatggtaatatgggactgagaacagcaaacctgggggtcttggagaggagcccagcctcctgttgaggttgagagctctgtcaccctcccttcccctgctgggtaccctgttactattgtctgtactgttttccattgtgcccagcagtagcaactacaaggtcacagaggtgggaactctaggtccagtggccagcttatggtgtgagcgtagtcagtccccctgttcagagcctcaggaagcttggagcacctcagtctcaagcctgtcagttccttatctctgggatgacccccaactatcaagactggaaacatacacattctccccagggagacagtcttaagatgcttttctaaagaagtcaatgcagttgtgaccatgtggccatgagctccaatgggactcgtgggcttggtgtccatgggccggagccctaagacccgcttccgccgctccaagagtatggcagtaaagggtctgcccatgcacatttgtgctccccgccagggccagcatctcagctctccagtctctggattctttcttctgttttcattttatgagtcgttgatctcttctttaaaatgaactgtttaacccccacctctgctggaccaggggatggaaaggaaagataaatgtatcttgttcagcttattgttaagactctggttctagggtgtggggctgcgggatctatgggaagaagcccagtatggcttatcacgtaaaccaatgtgtggcatttggggctggtccctgggatgctcaaaagtcagtgagagctctgtcttctcacactagcccagcccagcccacacccgtggactggtccatggtttaataaacacatgtaagagctctttccatc

SEQ ID NO: 284 - DNA, 1431 bp, Rattus norvegicus
  misc_feature: Incyte ID No: 216669_Rn.2
aaccaagtggccttgtagtttgccttacttgacagttgtggcatgtagcatcccctgtcctgggctctgaaagtgggcccaagacactctgcagctgtagagcgtcttcatgtcttggctgctggacgggccccagccactggccctttaggagaagccctggggtctgcacaccgccctcaccattgccttcacacagtgcactctgctctcagagtggctggcaggccgcattctgtcgctgtgcacataaagtcagtcagcaccctcctagccctggtccatgagggtgcagaaggctggggacatcagcacaacctgctaagcctcgcctccttggcaggtgtcactgttttacaatacgttgcattccagacctggcctctgtcactgattgctttctgggagcgggggtgtggcttataacttccccagagtgttgttttggttcactaacatatccaagggccctgtctgcaactgaactactcctgacacttgatccctgttgcatccttgtcttggctcatttcaggcaccagacacataggattcttggagcagatgctaagccaggagacaggatggggctgcttcttagagcccttgttatggcagcgctccatctaggaaacagcagtcagtctctcctgctcactgttctccctctctgtgctcaagtctgtcagtgctcgctggcctttggcctcttcccttgtgggggagggagcggctgtttctgcctgcttcaccgagtcttcacaagctgaggggatgaggccagtgttagtaccagggaccagcaacctttcagggctcccttgggggtctcaggtccacacacatgtgagcatcccttgccaggtgcccccatgtatctgtcagtgctgagacgccaaatcacacaacctgttcccagctgctgctgggggcctactgtgatccgaggagagtgtggggttgccagggagagcgctgtccctctgacatgcctgaccagtatgatgtagctttgaaagccggcagcatgtgagtagcaagatgtgacctttgagctagctgagctagatatcacatggtggtatgggtctagaggcccgccatctctggcgtagcgtgagtcctggctgtgtcctgttcaggactgccctacttcatgtgacctctatccctgtgtatctgtgaagtggtgcagatcggaaagaaagaggatggagtcctttacaagtttctacactagattgtagaacaggttttatcacaggcattaggctattggtttaccttataatatttaatttcaatgttacacattgaatattgtcatttttgtcgacagtgattggagaggcaggaggtatttgtgcctcatctattactgcaaaaaaaattggataaatgtaacaatgaacgtcctaaaatcaaaaaaaa

SEQ ID NO: 285 - DNA, 1295 bp, Rattus norvegicus
  misc_feature: Incyte ID No: 216720_Rn.1
gtctactccatgcgcgacttgacgtctgccctctcagatgaagaagttttgtcttatgtactctccgtcataggtaatttatgaataaaacctggtcctctcgtgctcagaactgtacatctgcctacgcctcatatgctgttgtgaaatgaatggtgctatagaggaaaagaccaggaaacccagcctttcctgtgggaccctcccagcattgatgacttctgacacccgatttttttccccagcaataggcccacggtcaattttgctctggacgctagctaggcaattctttatttctattcgctgttgacactgcttatgtgcaggtagccctggatccagcagatggatggcacagtctcaagaccccgcttcagacggctctcgaatgtcctaagttgcttgccgtgtgcttctgactcaccaggtatacggaggtttccacaactgcgtactcgggtccaattcgctgttttgagaaaacctgttggtcagcttattccaaaggataatttaaaggcagagaggggatatgtgctccaagaagtgcatgtgtttggctacctagaagctctacgaaactgtccttcatagatttttacaggtcttcctttgcataggcttgattcggtagacaggaagaatgtgttgggaccccacaagcctcatctccagcgaggagatgatgtacaaagtgaataatgaaccttgagtcagcaccatctttgcagatactgggtcaaaaatgtccagagttctgtccttgtggtttaatgttcttatatatttaagcatagcaaaactttgggggaaaggaaaccataggacagttaatcaccacaaagctttacgaagagctacatagaatccccctagcaaagtaacaaagcacctgtgacctttacaatgcgttctattggctgataaaaagagctcagatctccagcctaaagaggaaggcttggcaataagtgtaagaatagactctgggtggaggacgcaaaggtctaggcactgaggggcaaagctcagcatctgggcctaaacaatgctcaggatattgggggactcctagtagaatcgcaaaggatcactaggctgtttgaccattttcagtctggccttccaggtgaccagacatttttcatttccttctgaatgaaatgaatgttctgtttttttcctgggggaggcctgcaggattgaccccgtttgtccaatgcttcctctaagctgtgcttcttacagtaatgtagtggggcgaaagggacaggcaaggtctaatggttagg

SEQ ID NO: 286 - DNA, 301 bp, Rattus norvegicus
  misc_feature: Incyte ID No: 216800_Rn.1
ctcagaattaccttttagccagttgtggcaggcgatcgaatctgtgtgttctgtgttcctgactcagcagtttcactcgcagagatccactgcaggaaaataagtagaggtatgtcagatattgattatgggaagagatgtgcaccacagcacacgcttatgtctatatttatacttaacacatatatgaacaaatatattgttatatgtataacaaggatcagtgctaacacgaatgtctggcaagagggtaacacttaagactagcctgggggctggagagatggctcagcggttaaga

SEQ ID NO: 287 - DNA, 2049 bp, Rattus norvegicus
  misc_feature: Incyte ID No: 216830_Rn.1
ctcctacccaggggccgcggcggagccttggcggcggcgctcagtgcctgcggagagcgtccctgcgtcggcaggcggccatccacacgccgcggcgcgtacctctcggcctcccggcgacccccagccgcggcacccgcgctcgttcagctctctcgctcgccctccttccctgaggcctgctgcgccatggctttggcgttggcggcgctggcggcggtggagccggcctgcggcactgggtaccagcagttgcagaatgaagaggagcctggggagcgggaacagactgcgggtgacgcccctccaccctacagcagcatctctgcggagagtgcagcatattttggactacaagagatgaatcttgggtttccaacagcccccatcttataatgtggctacaacactgtccagctaatgacgaggctgagagaactcaaggctgaagccatcatcccttatggttcctgtaagagatgaagattttttgggtcgggatgattttgatgatgctgaccagttgaggataggaaacgatgggatttttatgttaacctttttgcatggcattcctcttcaactggattgggtttttcttgtctttttgcctgaccactctcagctgcgggaaggtatggggccatctcaggatttggtctttctctaacttaagtggatccttagttgtcaggttttccacctatttaccctggactactttgataggccaagatactggctctaggtagggtgttcttgagttttagcgctttctccatgtttctcagaggatttatcaaattatgcaacaagttcggcagatgccagaaactttcctcaaatctccccaggaccagagttctctgtacttcactgacagatgtcttcacggcaacagcctgcgtgcaaccgatgaagtccctacgagaagcgagagcacctgcaggaagtggaatcaccaccagggtgggagggaacagtcacctgctttaaaaattaaagtactgtttgaaaaagatccatttctctctatttgttcctaggtgtaaaatgttaatagttattgcaggattctggtaatcatacgaactcattagggggttaatgttagtgtaaaaaagctacttgcaatcacagtctagtgatgtattattaataatgccttatatattgttttgtagtcattttaacatagcatgagccatgtcccttatagtcagtagggggcaatcttgctctagttcatcctccatctcaaagcagatttgcaaattacagattagtgtaagctatggcataaggctggctgtttgaattaaggggttttctcacaagtctacacctttggttatgactgcatttctgcacataatccatatttcctgttcaaagtaatctagaaatgcgtttttattgtactgtgtgtgtaacatctggtaagctcaatacctatagtgctacagttcactgtaatgttatacctaaataatgtcctcaatgtggtataatatagcattactttttcatagtctatattcagaaagttaccttttcattccgtagttctgtgtagttcatataataatggaaagggcaaagatagaattcagaattaaataattaaatattcttctgacaaaactggatagaatctcagagggtcaggagacatagagatataaaaataggaacttatgaagaaggatccctaacattctgtactccttgctttaacaacatgttgtaaactgtagaatgatgtgcttgctgcccaagtgcatagttcagctttggttggtatattaaactgtaaatacaatagaacattaataaatgtctcttgtgtagcacctttcctgtagattagtgtttaattttggagtttacatttacggattatgaaaacattttctaattttctaatcttacacaataatccagagtatattctaaaaattaaaactttgtgtcttagggctttattgctgtgataaaacgccatgaccgagccaggtctggtagtgcacacctttaatcccagctctc

SEQ ID NO: 288 - DNA, 1255 bp, Rattus norvegicus
  misc_feature: Incyte ID No: 217071_Rn.1
  unsure 375-409: a, t, c, g, or other
gtcgctgctccggctccaacatggcggcggccgtacgcgctgcgggctgtctccccgcaggtgtgtagcgcgccggcaggtcatttcctgtctaggcagctctctttaaagcacctttccagtagcagccacttcctttttggcagcgaagacagctttcagccatggctctttgtcaccaagggaaacaagacacaaccactgtctgaccagcttgagccatgcacttggagacacagtgctgcatttcctctcccagcaactggacgggccagcagtacagaccctacagcttcttcaccaaattgactgcagaagaactctggaaaggtgcactagcagagactggagctggagcaaggaaaggcagaggcnnnnnnnnnnnnnnnnnnnnnnnnnnnnnnnnnnncaaaggccagattattggtgaagggcgttctggtttcctgtggcctgggttgaatgttcctcttataaaaagtggagttgttcagaacattggccagcgaagcaaagaagagcagcagaaggtggaggccgacatggctgagcagagggaagagtgggaccggaagaggaagataaaagttaaacgggagcgcggctggagtgggaacacgtggggaggtgtcagtattggccccccagacccgggacccaatggagaaacctatgaagacttctgataccaggattcttgagggtaagaacatgttttcaatatgacaggcaaaaggagggaagaaagaagtcagtccgtgtcctggttgctgttggtgaatggaaacggtgctgcaggttttgccgtcggggaaagccgctgaccgggcgagactgctttcagaaaggctaaagaaccgagcgattcattatttgcattatatagaacgatatgaaggacacacaatattccatgatatttcactaagattcaaataggacagcatatccggatgaagaaacagcccagaggttacggcctccgctgccacagggccattatcaccatctgccgcctcatcggcatcaaggacatgtatgcgaaggtcaatgggtccgtgaacatgctcaacctcacccggggcactcttccatggcctcgtcccgcctagtgaaacccaccagcatctggctgataagaagggtctccacgtggtggaatgccgggaggaatgtgggcctctgcctattgtggttgcctcccctcatggggccttgagtaaggagcctgagcccgaacctgaggtctctgata

SEQ ID NO: 289 - DNA, 601 bp, Rattus norvegicus
  misc_feature: Incyte ID No: 217080_Rn.3
cagtatacagtggcctttattggtcctttagacaaagattaaggaagacaggataaagactgaagacctgaccactctgagggttagttccttcaggcatgggatgctttctgggtagagctacatacttagcaagcaaccgccacccaagaccaatcccctcctaagaatagtcctctggataaggaagtgagtcatttggggctggctggtcatcgggcactaggaagatggccagagcctcgtctggggggccgagcccagccacaacaacagcagcagtagataggtcccggcttgtgggcgatagctacagccttcctgtggctactgcccagcagcttagtctcacaggcatctctctcatctcgaagcctcagattcagctccctcagcagctccagctgccttaggaggctgagtttctctttttgcatgttcctgaagacagcaaccacatctctctcgctgcctcagggctgcgcgctccaactcctgctctcgggtctgcagctccagctccaggtggaccctctcttcctcccggggtgggttctgggatgtacagccgcactagagccttcgctccgggctcagaaca

SEQ ID NO: 290 - DNA, 555 bp, Rattus norvegicus
  misc_feature: Incyte ID No: 217099_Rn.2
attgaaaaataggttagctttaatggattaatgctgctctataaataacagtacagttattgaaacgttccgtggaagacagtaatgcaaaccgaggtgacgggacagtggttttaatactgaagactgctcaagactgagaactcggtttaggaacctcaaggctgacagagccccaagcgttggaatttggcctgaaattcattgtgaaccttcagttgtgctctctccacactgatcggctgtgaggaggatcctggttgccatggcaccttttcttggatgcctgttcctcagctcccctggcagaccttagcggcgactctttttaggacttcgagcagaagtgccaagtcttcccgtctgcaagggtctttagtagcagacacatcttgcctatgaatttagtcacatatacaatacaagactgtaacaaaaaccatgtgtgtcacatttgttctggcccttgcctcgaaccaaaaaaaaaagtttagttcaagagaaaaaccttaggagccagatgacgattccacttgctttcctccaccgcttaat

SEQ ID NO: 291 - DNA, 334 bp, Rattus norvegicus
  misc_feature: Incyte ID No: 217254_Rn.1
aaagaaaaaaggcttgttccacgtgatatcctttggatggaccagggaaatatctgattaaaaacaccaagcattgcctcagaggtaagccttatgccttggtacagaatctgctcagacggctgggcctcatgggagctgcttgaccgacccacagcccattcctttaaatttcccactgggcataaatcttagccttacagaataaacttaatacgtagaaacatcatgagcactttagggtgtgataaaaaagaaaaatgttcccactgaatttggggttacctattgcaaatgataaagtaagactttccatgtgatctataacaaactg

SEQ ID NO: 292 - DNA, 857 bp, Rattus norvegicus
  misc_feature: Incyte ID No: 217305_Rn.1
  unsure 310-410: a, t, c, g, or other
ggtctacatagcaagtgtcagggctatacagtgagaaccagactccaaaacacaaacaacgacgacaaaaggaatgtggtaaccaaaatgctgaatgttaataacaaatcgcacatggatatggactatgaataatttatggatatttctaaaatccattgagcactttagaaagtgacttattacatgtcattgtcacgatactggctgctctttagtttttgttgtgacaaaagcatcagcctgttgccaggctgtggtggtgcagacccttacttccagcactaggaaggcagaaacgggcagatcnnnnnnnnnnnnnnnnnnnnnnnnnnnnnnnnnnnnnnnnnnnnnnnnnnnnnnnnnnnnnnnnnnnnnnnnnnnnnnnnnnnnnnnnnnnnnnnnnnnnngagaccgaccagcctacatgtgattagtgtcgtgggaaaaatcataagaggctatggagaaaatgtgaacttatatttttaaatcgaggaaagtttaaacattttaagagggcaaaagtaagtattaaaaactaaaagaattcgacttgtagctagtgatggctgttgtgactgtctgctctgcatttctgtgcagagggttgttttgttttggtgatagtaggaattagatcaagggcttcctccatgctcggcaaacacaacctctgagctgcacccacagcgtctcaactgtgtagctccggctggccctggctggccccggctggcccaggactcacagaaatttgcttgtctctgtgtgcagtccttactttggttgctttatccattggtcttctaaagaaataagagtatagcagttcactatccaaagtatttattctt

SEQ ID NO: 293 - DNA, 620 bp, Rattus norvegicus
  misc_feature: Incyte ID No: 217436_Rn.1
cacacacacacctctgctagaagtcctccactccgaggtcccacctctctagccaagaacgtgagaggaaagagcttcttcgctcacaaggctgtccctggctgggtgagtccccctcaggaagatctaggaggatgaacagatcccactctctgaagtcccagatggcacctcacacttgcagagcttccagtcccacaggccttctgatgacagacggacaggcgtgggaaaggcggtggtgagcccatcttagaggggccacctcactccgctgtggtagctggtcaagggctcaggcacgcagaagagcgttaagtctatcagctccaggaaaagaaggacggaccgtacgggtcacgggcagacctaccacaggtagtgggacacacggaccatccccagaggcagactctccttgggtttgggcagcttctgttgaagatgaaaggctagcccacctaaagcgtgccatctagacacgttctcaggggcagcggggagtgactgacgtgaaagcgaagttctgcctccctgcctaggaccttcaggcctgagggaggcagactggaagttggcagacatggggttggtaacgaatgctttctcccacgtgtcct

SEQ ID NO: 294 - DNA, 979 bp, Rattus norvegicus
  misc_feature: Incyte ID No: 217440_Rn.1
caaaacggagggtgtctgcactaaggatttagaaacactttggaagctcatagcctcatgggaaactgcctttagccacactccttgaaccttaaattaattaccaaaaagatggaatgagtttgtgggaattaagccatgttattttaattggatacttttttttttcaactttctgtgtatctttaaaattgttactgtggaatgattttcttgccaaatatctttgtcaggcaaaattattggcctcaagggaggtgaagtaagccagatttggggtgaatttatgtggacttgggtgagtttgtagttctactttatattcataaagatagttttttaaaactcccaaagcaaatctattttcttctctaatgtaaaaactcatctttggaggaaagagttaagtgtccaagggttgtaacagatatgaggtcagagggagctcgcttggctctgcgacgctgcccctccacagctgacagactccaacagaagtgtatttaaatctccagtggacagagctgggcagggcaagggtagggtgggcctgggttagtgagatgcaggctgctgtattttaaccagtggttcttggggaggggtgcctggagaatacaaagtcacttccctttttttgaaacaaaaccaattagaaaaaaagctacaattttatttgtattagtaaaaataagaaaattctaatgtccctagtcacaagggaccagttccactttgaacagtaggaacttaaatatttgaaaacatttggggaaagggaaaaattggctttctgtttaaatggacatatgttaacaatgggaggatctgtttattgattggaatgtgttacagtataagtaaaagtatatggacatgagtctttaaggaatttatacatggttcagaaaagatggttggtaaaatcttgattatgtctttttgttaatttatctcaataaaagcccactggaactcc

SEQ ID NO: 295 - DNA, 1972 bp, Rattus norvegicus
  misc_feature: Incyte ID No: 217471_Rn.1
ggcttcgcgtgcgcaggcattctgactcctgaattccacacgaggcggcatgaagtgcttagcgtccgagtctcccgatgacctcggccgctacggcgaccaccaccgaggtgcaagcggaaccgaccggctcttgaacagctggacagacagcagataagaaaggcagtagaagttctgtttgataactccaagtccagaaaaaaataatgaattgctgttgaatgggagtgaaaatctgtttttaatggtgatactatggaaaattccaaagaaagaacttaggatcagagtgtctttgcctcatagcatcctctcagaatcctcagaagtctgtctgtttaccaaagatggaatgtgattcacctgaacagacagagggtttctataaaaagcttttgaaaaagcatggagtaaacactatctctcagattatcccctttaagacgttaaaaacagattataaagcctatgaagccaagctctgcctcctgggtagctttgatgtctttattgctgatgaacgaatccgacggcatttgcccacacacataggaaggcatttctatcagaggaagaaagttccagtatctgtaaaccttctggcaaagaatctgtccaaagagattaaccgaactatcacagggaccgtcttaaacatctctaagcgtggttcttacagtactatccgtattggtcacactggaatggagattcagcacatcattgaaaacatcctgactgtctcagaaatgctttcagaaaaattgccagagaaatggcagcgtgtgaaactcctattcctgaaaactgagaagtcggtttcccttcctatcttttcctcgtttgtcacatctcaggacgaaaacagcgcttccttccgtggtctgaagaaacaggaaccaaagaaaagaaggaagcatgaaaaacaaaagttgaagaaggaaagcaaaatgttaaagaagaaatccaagaaggctacatctcttttaactcaaggtggcttagttagcagtgctccagcaaagggcccgggagcccagaagaaaaggaccagcaaggccagcacacagccgaaagttacagaaggagtatgaagaaacaattccccaactggtaccaataggagaaactccggataaagaaaatatgaagatgcaagaaaatatcacagggaagaagtctccaaaatcgaagtctgatccaagaacccctcagggtaaaaaaaggaaggccttaccggctacagagactccagaagcctcagatcctgggatctcagggaagaaacaaaaaaaggatgtgcgggaattcagaaagccaggggccaagtccttctctactcccatgaaatctggaaagaaagcttccaacactcccagagaacaaaaaaacccaggctgcccactcaaactagaattagtgcatttggcataaaagacatcagagttaacaagagcttttcaagaatatttagacagggcgtgctggcgtttgtgtgtgatgcgcgacgacgcgtgcgcgcccacgaacgaacgcaacggtggaatgcagagataggcagaatgtgataatgaagtatatgaaggacaaccctagttgtcataacaaaaggggtcacacaagattcattctttaaagggcagatttaagtcctgggcttggtggtataacacttttgacagcaaatgcaagatcctagccttaactacactagagctgtcaaaggaaaaaagataaaccccacacaagaaaaggtactctgctgtttattccatcacagcgtttttcaatacaaggagtcgcaggacttaaatggtttttgagaagtttctgtgggtgcctctgaaataaatatttttgttgtaaaaaccaggggtttcaggcacaatctttttaaattgttcagtgtatttcctgatgcttctgtacatttgctttttttgaaattaaacttacatcccttctgggt

SEQ ID NO: 296 - DNA, 381 bp, Rattus norvegicus
  misc_feature: Incyte ID No: 217515_Rn.2
tctctccgccctggaggcgggctctgagggtggcttccggcgtgacctcgcaggtttgcgctccttccaacatgcagggcagcacgagaagagcgggagccatgacagatgtgcatcggcgcttcctccagctgctgatgactcatggcgtgctggaggagtgggaggttaggcgcctgcagaaccactgctacaaagtccacgaccgaaatgctactgtagataagctcggaggacttcatcaacaatatgctacagtgtcctggagtctctgtatattgagataaagaaaggcatcacagaggatgacgggagacccatttatgcactggtgaatcttgctacaacttcagtttccaaaatggccacggattttgcaga

SEQ ID NO: 297 - DNA, 1698 bp, Rattus norvegicus
  misc_feature: Incyte ID No: 217688_Rn.1
cgcgcccgtctctgacaaaaggtgtattttttcgtggctgagttgcttccaccatggcggagatggcagagctttgcgagctgtacgaagaaagcaacgagtctgcagatggacgtgctgcccggcgagggcgatatggaggtaggccgcggaggcccgcgggccggccccggaggagggccccatggaggaggaggccgggccgtccgccgcccgcgcccagcgcggcctcttccccgaggctggcgcggacctagaaggcgacgagtttgatgattgggaggacgactatgacttccctgaagaggagcgctggagtggcgcgatgcacagggtgtccgctgcgctggaggaagccaacaaggtgttcctgcgaacggcgcaagccggtgatgccctggatggcgggtttcaggcgcgctgcgagaagagccctttcgaccagctagcttttatcgaagagctgttttcgctgatggttgtcaatcgactgaccgaagagctcggttgtgatgagatcattgatcgagagtaaatgctgatgaaagaggaggaaactacctgagagggagagattcaacattctgctattcttggggttcattccaaataagttctgtgcaaaaaataaaaaccagttggtttttgtttctcggaatagaagacaggacagtgaatgaataaccgtgcattgtggaaaaggagaatcaagaaaggaggagtgttaaacctgagaatcgcaaggagaaaagaccataaagtgttccttgtttggtctcacagggcctcagctaaaacctctgggtcagactgttgatcgagatgatttcccttacattggagaagaactttctcgtgttaagcttttgaagatgatttgaaagagtaaattatgactgccaatacaagaatctaattaaagaatgatgaacaaaagatacatccacaagatatctttgatttgaactaaaaggctattgaaaaaaactttgtaaattcttctttatggtttatacacatctagttatcaaaagcaaaatttgaggtttaagattgagcattcatctaccccagtagggtagtcaaagtaacatgtgtgtgtaaatgtagacgtgttaccatggtgtactatcctcttaaaacgtgttactaaagctgggattgtgactgcactatgctatcttcatgatttataaagctactgtggtccctgatctattgtgatgacttataaagtaatagaaaaaaaaggatgtctttttaaggttttaagttcgtgcattaaataaaatgtatgggaaagcccaaagacaaagtttctaatacccttttatactagggaaatttcgcttgctgtttttttgggttttttttgtgattgtcatttttgttttttaccttgacagatggtaagagtataactgacgttcatattgtaagaagtgtttgcaaaagttgtcaagtaaaaggaaaccctacctgtatctagaaaagatttttgagctcttatgctgtcaaacttggaagattttaaacctacccagaagtccacctgggtgcttgatactcatgttctctccctctctccctctctgcctctttcttcccttccccctgccctcctgatttgcttgttactcttgatgcaccagcattggcgataataaattttctcgttctgagtattttgctttgcct

SEQ ID NO: 298 - DNA, 1310 bp, Rattus norvegicus
  misc_feature: Incyte ID No: 217863_Rn.2
gcggagcccagccagtccttggacccgaaggctcaggctgagggtccacacccaggagcaaggacgtggcacgatatagctcaggttgacgacgccacagaaatggatgcgcccggacggtcgagaccgatgcttcccagggacaccagcccatcctgcagctgagaaaccctcgtgtctacgacccactacagaggtggtcttcccagttgcctgatagcaatcagagcgaccccgtagtcattcgcgcggttggagcgtctggcgcagaaaggaactggacgagaatgtatcaaccaagtacaaaagttctgtatttccaccctgtcattggggcatgtgctccctcccaccactgtaagtcctgtttgtggttctgggacctgcgtcgtctgggcgcgatcctgtacgcttcgttcccgcctatgctaacagctgagcactggtgttgacagaatccttaccctgctaactgcaactgatgctttcaggaccccaggcctgcccttgtaaaagtgggatgctacgtttctaccctcactggacacttcagttcttcacgcctcccttcatttagggggactcaagggctctcacgagtgggaccccgtagcagcggtagacgccagagaacacgccgatatatgatgcgagcgcacacgcattgacccctctagggacctacttcgttctctgatgcgggtagatctctgcctctttgagccgcagtttctctcggagagtatgcgttctcactctctctgtcctacagcgcctcccggtgttcactcccgaccactttcacgttggcgctccaggggctgccaccttgtccctcagcacctcctgggccaccaggtcagcctgcatacggcccatctgttcttgcagctccactctcaccctggccacttcagcccacttttctcttggtccttgttgctcagctcctgttgcagctcctccagacgccgctgctgtccctccatctgcaggttcagctggctggcccgtgcctgggactgggctaccatctgcttctgctgcatgcaggtgccctgagcctcatcccttgcctgtgccaacagccggatcttctcctccagatgagcaaggcggtgttgctcctccaagcgagcctggttcttggctttgatgagctcctcctcggcttggctgcgctcactgagtactgcggccttcatgcggctcagctcctcctccagagacagacgtagggcctctagtctctgaaccctctcctgcatggccctctcactctcctccaagtttcgattcatgtgatccac

SEQ ID NO: 299 - DNA, 2752 bp, Rattus norvegicus
  misc_feature: Incyte ID No: 217890_Rn.1
aatgtgtattcctacaagcaagtgggagtgtccctgaatagaatcttcaccgtcaacccccaagggtgagctggtgcaggagcatgccaagaccaacatcagctcgtatgtgcggctctgcgaagtggtcgaccacgtcttccccttgctgaagagaagccattcctgcgacttcccctgttcagacactttcagtaacttcaccttttggagagagccactgccaccctttgaaaaccaggacgtgcattcagcctcagcttgattcgacccagcattaaaggataggttgtggggaccctggagctgctgggaaggctgatatgtggccatccgtctgagagaagcatttctccctcaactcgctcgccccagggtggcacctctaagcatggagggcggagaggctgcatctcatcccataggcgtcaagaggattgggtgcactagcagtgtgcaaacgcagccctgtctgggtttagcacacatcatcttgcaccctccagtccagtctgctccagcagttagttaatgtgcaatatgggcgatggccccttagcagaagcggcaggccacctgagagctgtctcagtatcactgtgccccatcccctggaacttctgatgtgcatagtgattggtagcataaggggcacatttccacgacggtgacatccatgacactttcctcacatagggaaggctgtgtcccgatccttagtaaagggaacatgggcctcgctcggctctcagccctggccttggctttgactttttagacgttccctcgcagtattgctgacttagtctcactttagctgataagctcttaagttgctttggttaaaggtggcctgtgacgcagctgcatctccccattcctcatagctcaacgcctgggctatgtctgccttaacgcatctgcagcaggcatgtacttagtgtgcactgtctagctctccgtaactgcaatgccttaccttactgtggggagtccccaaggcagcatccgtggcatctcagcacctcctgcgtcctgctacccggcaaggaggcgccactactgtggactcaagcagcatttacgccaaacgagaaggatgccgctaaagaaactggttgtttttttaagaaacatagtttccggaagttaaattattgttctttgcagataatatttattactttactgtccctgggctgctgtacagtgagcatcctagccagatccgtaggattatggctgttatgaatgcattaaaagtcaagtgtgctagacaatccaaagagccttgttctgtggatgccacactgatcttctggaacctccccttcactaacttttcttagttttttttttccccacgcagtctaagggcaagaaaaaaaactgtagtaatttgagcaatgttctttaagcggatagaaggtagctgtgaactgtctcagaacaatgtgaaaaatgaaataagtattttggtaaaagattttgctttactttgaaagtattatttttctaaacggtgatttactccacgagactgaaagacctttctatttaaagttcgttgttagagtcagaggagcaaaaaaaggaaaaaaaaaaggatagaaagaagagttaaaaaggacaaaaaggagcaggatggactgttactctttctgtgaaagaaaacctagagtccttgccattgtagtcactgggctctgttaaggtcggatgtggcctaccataattcaccggaacggccactgaaaggcagctgccatccactgtggggtatccactggatggagaaactcagacctgagtgtgtggctccctctaggtgtcccacaagctcatgacagcacaagttctgcttgtagggaactccgtggcttgttgtctactgacctttagaggcctcagtaatcctcccggtgggttggttttgtgtgtattttgattgctgtgtgacgtgtgtatgagctcatcagcctgcagagaggttcgagccctctcccgtcatgcccaggggacagctttggaatctcttcaagtgccctccgcagccagatatccaggtagctttctgacagcattgctatgcctggagccagtgtctctctaaccaaggctggtctgcagtgcaccatctcagaatgcagcagtccttccacttgactctggaacctagttctgatttaccttaaacttccccatcagtctaccctccaacagagcacacctaccacaaaaccgcactctaccttgtgaagttctttgggagccctggacaggcagtgatgccgacacttcctatgaggctcccttgtgagggccaaatgggagtgtgctaccctaggttctctcaagtcacttatctgctatatgcatctaaaccctcaggggtcccaatggtcccatgctgtggaaactatatgggtgccatacatttcagagttgctcatggataatgagcgacttgctctgtagtgacatgtcctcataatgccgatcacacacatggaggtgaactcactttggcacactgcagagacaggcttctgtcgtcacagacatgtcccctttggacttcaggttcagatcactacttcagtatattctctatttacaacgttggctgtgtgtttgcaaatgccggtgtgatgacggaaaagaaatcaatgtaatatttcattgcgttgtgcttgatgcagagctagaaatttctgtaataaacaagatgagtgaacgacttccaaaaatc

SEQ ID NO: 300 - DNA, 2335 bp, Rattus norvegicus
  misc_feature: Incyte ID No: 217946_Rn.1
ctcgagagtctaccatgtacccaaaagccgtgcaggacctctgtggctggcggatccggagccttgcctgcgggaagagcagcatcatcgtagcggccgacgagagtaccatcagctggggcgcatcaccaaccttcggggaattgggatatggggaccacaagcccaagtcttctactgcagctcaggaggtgaagactctggatggcatcttctccgaacaggtggccatgggctattcacattcattggtgatagcacgagatgagagcgcagctgagaaggagaggctgcagaggctgcctgagtacaccccacgcacgctctgagcagcagcaggccggcactcccctcgtggcagctgtcattcccacgtgcactgggaccagacgtcagacaaggaatttaggaagcaaaagttgaccaagggtgcattgggttagcctccctgaggttccgtttccaagcgattcaacgttaactaccttttctgtatgctttccaaagtgttttccctcaacgttgattaaaacatttgctcatagccagcttgcctttctacgagacaggcaggagctccgggcggtttaggtttttttttaagttgtatttcttttctcccctctctcgagtacccttgtgcagccctcccattccagccataattagcattgtgatccgagtgggcgccacatgggagagggattgccactctcccagacagaaacggcccttccaggaaccagcagcagctaggccaatccctgcctgcccgctgtgagagaccagtcacttgcttgtgggcccacccacctgccctctgaccccctctcccccatagctattgctggcttgctgtttgcaaggcccatgtgggccttttggctgaagcatttgtagaaccagccatctccccctggtggggctctggggtctgtgtttagccatttgtatctcctttagctctcaagtccaaatgagaatggggaccatggggtatggggtgggcagttagagattggtcagctagcagtcaaatgtgttctcagtcctctgtgacccgcagttgccgcctttgcgctttgcctgtctgctcctgctgtcccctctgcctgggatggccaccctatcctgagacttggccattgttctcccagcctcagtgttctctggccgctgcttgcgtttgcttggctctggtaccaaatagttgggattcctgatgaaattccctgccctgcgtgtcagttcagactgtcaccacatccccacaagtgccctctcccgagcccatcctggcattgactttgtggctgagttccaaggtgcctttcccggatcctcctcactgggcccgagtatgacggcagctcgggctggggccttggtttccggagggtctgggctggtttgactgctttaactaggattagttcggtggtgcttgggggaagggggctaaggatccaagtgtgaggtggggtggatgggaaagtcaagattctggccttgagattcatggttttgcttttgctgttgtgacgctcgtctctgtgttaaaatgccaaaaatgacctggtctgttgcttcccctgccccaatgctgcacagcagcttctggctttgcaaggtgtctgtctcggccagtgacccggcctgccggaaagggtccgcgttctctctgtctcccgtcacatgtccaactctagtccagagacagcttctgttaggggcagagcttctgcaaaacttaacctgcgtttgcccaggtcaccctagacatcacccctgccactgactaccggtcactgccaacgtgcgggaccggagcctttcctggtctctgtctggcgtgtgctgttcagggtctgctccttctgtcctgggggtctcctggagttagtcgtgtggtctccttgttggtttgaggacacagtagccctgtagctgtaactaggctcatcttccagggagctataacctttagccagcagtctgtccccttgggctggaggcctgaagtgggtgagcagaaagtgtcttatgggtagagagtcctgtgcctggccacagcccccctcccttcaggctaaaattctcaccatgagctttcccaccagaaactcaaggtgggaagccctgggtaggaaccattctggcctcccaggggctctgaaattttctggtcatcgagaaagcgtagcgcagagggagtggacgaggatgggattcggtcgaaggtgcctggtttagtgctgttattgtctaattttttttttatatctatatttcttggagtaaacattttaaataaacggcgtcattgtttactctg

SEQ ID NO: 301 - DNA, 3406 bp, Rattus norvegicus
  misc_feature: Incyte ID No: 218168_Rn.1
cggacgcgcggggagctgggcagagtctggtgagccatggcggcggcagtggcgggcagccgcagcagtgcggtcccggatcctgcaggtttcttctaaagtaaactccacatggtatccagctaacctctttctcttcatcatcagtggcaactgtaaagctcttcattgatgggaaatatcttgaatccaaaagtgacaaatggattgacatccacaacccagccacccaatgaggttgttggtcgggttcctcagtccaccaaagctgaaatggaggcagccgtagccgcctgcaaacgtgctttccctgcgtgggcagacacatctattttaagccggcagcaggtcctgcttcgttatcagcaactcattaaagaaaacctgaaagaaatcgccaggttaatcacattggaacaagggaagactctggctgatgctgaaggagatgtgttccgaggccttcaggtggttgagcatgcctgcagtgtgacgtccctcatgctgggagagaccatgccatctattaccaaagacatggacctttatttcctaacggccggcctctgggagtgtgtgcaggcatcgcaccatttaattttcctgccatgatccccctttggatgtttcccactggctatggtctgtggaaatactttcctaatgaaaccatcagagcgagtacctggagcaaccatgcttcttgctaagttgcttcaggattctggtgccccggacggaacactgaacatcatccatggacaacatgaagctgtaaattttatttgcgatcatccagacatcaaggcaatcagctttgtgggatccaaccaggcgggagagtacatcttcgaaagagggtcaagaaatggccagagggttcaagccaatatgggagccaagaaccatggggtagtcatgccagatgccaataaggaaaataccctcaaccagctggttggggcagcatttggagctgctgggcagcgctgcatggctctttcaacagccgtccttgtgggagaagctaagaagtggctgccagaactggtagagcgtgccaagaatctccgcgtcaatgcaggagatcagcctggagctgatcttggtcccctgatcaccccccaggccaaagagagagtctgcaatctgattgatagtggagcaaaagagggggcttccatccttctggatgggcggaaaattaaagttaagggctacgaaaacggtaactttgttggaccaaccatcatctccaatgttaagccaagtatgacttgttacaaagaggagatttttggtccagttcttgtggtcttagagacagaaaccctggatgaagccatcaagattgttaatgacaacccatatggaaacgggactgctatctttaccaccaacggagccatagctccggaaatacgctcacatggtggatgtgggacaggtgggcgtgaatgtccccattccagtgcctttgccaatgttttccttcaccggctctcgatcttccttcaggggagacaccaatttctatggcaaacagggcatccagttttacactcagttaaagactatcacatctcagtggaaggaagaagatgctactctttcctcacctgcagtggtcatgcctaccatggggcgttagaacgttcaagactccatccagcctgagtaacttcccactgtccttggcaatcttcgtctgccatctttgctcaaaacagatccatgaggatggagtatattgcaatgaaattctttctcagaactcgcaatcccttcaaagttatagggagtacaggataacaccaacgccaggccttcacttgttctccatacttctctacggtttttgaggttaactgttgttaagcgtgaagtgtttgcctagaataagagcttagaactgtcttctaacaattcttttctgatgacttggagggacaacgtaggggcagatcttgcaatcactgaaactgttcatcctctgagcctcaattatagccctccaccagtccccacactatcaaacatgtaacctagttttacttatcccagcatggtgatgactgcttttctgctcaataccactttcttcatggccactatttaattctatccatttcttgcttcttaaaatacttctcaaggtacctcaggatgaagtgataagttagctttttgttacatgtgccattcttcatggtttgcctcaacaatcattaaaccaatactctagcctattaattcagatacaaattaatccttagtccattatatttcacaaatggtttttgacccaggaatcaaaggatctccaatcctgaaagtgaatagactctgtgccttaagtagccttacctattatttgccaaaatatgttattctttcttttgacagcatttctctgtagttgatactctgttaatgaacataactcttcatatagaataattgattaggctacctagaaacttcaaagtttcatgctttgacaatattcagtcaccttattcaacttagccagttactcagctgcctttaagcttgcttctctgataatctgaaccttaagtcagaagaggctgatgtgctgaacagaacagtttgtccatctgacctgaagccttggctttctgaactaggctatgggttctgcttagtctttagtgcttagtgagatgtggcgctggccatttatttccctctgttctgtacagccatgtgtggacagtgctgctccagtccatgtgggcttttggtgagtttgagataaaggtggtgaaaaacctttgacatgttcctactctttggatatagatttgtagagcaaccggcattcggtagaattcagagcttcggtcactttaacaaaccacaatctgctgatttctttctgtgtttccaccgctaaagctaacagtagactatttatacggttgcgtgactcgcatatataagtagcagtatcatacgttaagttgtaatgccatacaatgtttgggcctgggctgaaacagtggttattatcataaatgtcgcaaatagaatttcaatctagactcactgatattcttcacttagatatgaaggaagtttcttttgaaacaaatatatgaataatcagaattgtaattgcttctaattataaatcaacagaataacgagacaagactaactagtgactcaaaagaatttcttgtattacttaagaatgaaatttataatttaggactaataattaaaggattaatatcatctataaacagaataactagcaatttatcacttattgtttttatatggcctcaatcaagtttttgtgagcttctatactgatcatgaataataaaatacaaataaaaaagccttaggaaaaaatacagttttgaaaaacgtg

SEQ ID NO: 302 - DNA, 779 bp, Rattus norvegicus
  misc_feature: Incyte ID No: 218188_Rn.1
agaagtcaagttcccattcatgttttactttccggtctccttgtctcacaggatactaccccctagtattcttacctcagactggtacacatatggtccttgtacatagtttccacagtttggcataacttgtttgagctccattttccagattgactgatctttgccatcttctgggtaaattctgtgtagtctttcctgaatgtattttgtctgtggtggctgtatacctggtactatcctttcctcctaacttttctgtctagatctgtagaccttacaaaaaagtaatcaagatactatcatctgtatctacgagacgtaaattttgttatttgtttttttaaagacgtggttctgctacaagctagtcttgaaattcaatcaaccttccagtgacagcctccgttagtgttgggatttatatgctacactaccatcccagttcttgtgtatttagaatggtcagtctcaatgtaagttgggaactggccttgaacttgctatgtagattagaggactggttattgaaactacctagaaccctagatgctcatatcataagtcctgggaaatataataagaggaatgtgccacaatgcccgaacttaatttaattaaaaacaaagataacattgtatatgttcagttggtctgcgctaaatctgtaattctagcacttggtagttgaggcaggagaaagagtctcctcgactacacattgagtttcaggcaagctcctgcttcaaaaacccaaaaaaaaaagaaaaaattattaa

SEQ ID NO: 303 - DNA, 1773 bp, Rattus norvegicus
  misc_feature: Incyte ID No: 218598_Rn.3
ggaggctcgaggaaggcaggcctagcattacggctccagaggaatagagcgtttaaaggtagaaacaggaaaaggcaagactcggagggcagagagggttaaaccactgttaaggaatcgaactcagtcttctgaacttccctccgaggcaaagctcctctctgccaggctggaccctctttctggagggatttcattttgggaggacatgaattctggctgctaaatgagatcagcaatttatgacaaaattttcagagactgtttgatttggtgagacagacagggccatcagtgtggaatgtcccgagaaggcgattgaaaagtttatcagacagctactcgaaaagaatgaacctcaaaggggaccaccccagtaccctctccttatagccatgtataaggtcctcctaactctgggattaatcttgttcactgcctactttgtaattcagcctttaagcttcattagcacctcgagccaggtgctttgctggaagctcacgagcctggtgctcactcattcatcacattcggctggtggccttgcccattaccaagaagtacatgccagagaataagggcgttcctctgcaaggaagagaggaagacaaacccttcccagactttgacccctgggcatcaaataattgtgaacagaacgagtcagagcccattcctgccaactgcactgtctgcgcccagattctacccctcaaggtaacgctcccagaagacactcccaagaactttgagagactccgtcctctggtgatcaagacaggacagcctctgttgtctgcagagattcagagcttctcttgtcagtaccctggaagtcacagagggcttcaccgatggcgttctcaccaagtggtggcgctgctttcctgagaggtggtgcccggttccttacccaatggagaagacctctaaacagatcacagattttacgggaacttttcccagtttttacccaacttccatttccaaaagatgcctccttaaacaagtgcttcctgatccaatccggaacctgtggtgggtagcaagatgcatagaggtgcatgacctgtttaccattggcagtcggggaagccatgttgcagctcatccctcctcttgccagtgcacgtatgacactgtcagtctgtggccatgccgatagagtctggggacattggctatgtctggtgctgcccactggaaggtctaacatcgtagccagaggggtccagccattcggtcatgtgtgatggaaccactctctcagaaactataggaaacaactgcttggagacctgagacctaggctggaaagagtgcggagcggggaataaaacactgaaacacttcccacggttggttgcttagttacctgccctggatgctcggctgtcagctgtatgctagagacagtggcttgggcctcgccctcttgtctgtctagattcctcaggaaggatcaatggagactggctgctggtcaagactctgctcgcatttctcctctcccaggcctttggattccagggaatgggaaataggctggtggctctgtgaagtgcgtggacatggttcctgtactgtcttcttggtgtgcagtggaaggcagcaataccacctgtttgtccactcttcttgccacaccaccctgtacttggtgggaaagccatggctgactttaatcggtacagtttgacagggacaatgaatttggagccagtgtgggggatcggatcgctggaattgcacgtgtaaaggtgcctgcca

SEQ ID NO: 304 - DNA, 1358 bp, Rattus norvegicus
  misc_feature: Incyte ID No: 218659_Rn.1
ggaggagacaccgtgcactaacggtgccgactgcgtgctagagtttccagccaggaacttcagcctgccctgctcggcccagggctggtgcgagggcatgaacgagaaacggaacctctacaatgcctacaggttcttcttcacgtagcctgctgccacatagtgccccgccttccctccgacctctcctggacaccatcggcaatgctacaggagagctcgcctggggggcggatgagaccctggcccagctggagatggcgctgcacctgttccggagtgggcagtacctgcagaactctacaagcagcagggctgagtaccagcgcatcccggacaaattaccatcacacaggaggattatcgctgctggccctcctaccaccatggtggctgcctcctgtctgtgttcaacctggctgaggctgtagatgtctgtgagagccatgttcaatgtcgtgcctttgtggtcaccaaccagaccacctggacaggtcggaagctggtcttttttaagactggatggaaccaagtggtccctgatgccagcaagaccacgtttgtgaaggcccctggttgacgggttgcgggcctcgctgaccagctgggtttgcctgctgcaggcgtgacttgcatagcacccgggaaccctgcagacagagctagcgtcccagagcaactgatgtgaccaggacaaacgtgcaactatgcaaaagtgttacatatgtgtagtttgccagctttcgggtctatagactgttgctctccagctctgagcgtcatctggttgggatcatgagtgcctcctctggagctgtgagcagggctctaggcctggtcttaactgggatagtcccatgggcagccccattactgcattcacaagtttgagaatgtagccagacactgcgtgctgactgtctgctgcataagcctactatgtgggcaggagctgcacggggacacgtcagtcgcagagtgttcatcatcagcgtctagctccattattggatcgaccgggggaatgctccaagatgtgatgggagccagccggtgaggaaggctactcatggcacatcttccctacgggttgctccatcaagccaagccacaggtcatgggcagcagtgcacacatccatatgagcgcaagaggtagagtggaggagcagattgcatttgagtccaggacactggggtgggggatagggtcggggccatttcatgcatcatctcgctttcagatgaaagccaacacaagacagaccagaaatcaaggctctccccctcactggagtgtgcaatatccagaaagcttttgtacttcttgttcatgaaattgtttatttttgtaaaaaa

SEQ ID NO: 305 - DNA, 490 bp, Rattus norvegicus
  misc_feature: Incyte ID No: 218714_Rn.1
gcttaagcaataggcaaactgcattgctcgcttgtttcttggagtcttctttgcccctccctactttctgcttcctggggagtcacccactgaaccctgaaccgattcttgctgctagtctgctgtgcttttgcacacgaactccgctgttggctgaggtctctgtgggtctttgttctcaactctgacaaggctcgctctgtgctacacagtttcttttcttgctcttctgccacagaaccacaaatatctccagctgggaatcagacagggacagaaatgaggaacccaggagcccaagacaatgtttcagtttcccagggtatgcgagcgatgttttacatgatgaagcccagtgaaactgccttccaaacagttgaagaggtgcctgattacgttaaaaaggcaactccatttttcatcttcttgattctgcttgaactagtcgtcagctggattctcaagggaaaaccatcaggtcgtttggatg

SEQ ID NO: 306 - DNA, 1090 bp, Rattus norvegicus
  misc_feature: Incyte ID No: 218772_Rn.1
atcagcagccggccaccgttggtggtttttatgatcagtgtcagcgccatggccatcgccttcctcaccctgggctacttcttcaagatcaaggagattaagtccccagaaatggctgaggattggaatactttcctgctccggtttaatgatttggacttgtgtgtatcagaaaatgagacactgaagcatctctccaacgataccaccacacctgagagcaccatgaccatcgggcaaaccagatcgtccacccagccgccccagtccctggaggagtcaggccccatcaatatttcagtggccattaccttgaccttggaccctctcaagccctttggagggtactctcgaaatgtcacacacctgtactccaccatccttggccatcagattggattgtcaggcagggaagcccatgaggagatcaacatcaccttcaccctgcctgctgcctggaatgccgatgactgtgctctccatggccactgtgagcaggtggtgttcacagcatgcatgaccctcacagctgcccctggagtcttccctgtcaccgttcaggccacctcactgtgtccccgacacatacagcaacgccacactctggtacaagatcttcacaactgccagagatgccaacacgaaatacgctcaagactacaaccctttctggtgttacaagggcgccattgggaaagtctaccacgctttaaatcccaagctcaccgtccattgtccccagatgaccgacggctccttaataaacctgcatctcatgcacaccagttacttccttttcgtgatggtgataacgatgttatgtctatgcagttatcaaaggcagaccccagcaaactgcggcagagcaatcctgaattttgccctgagaaggtggctttggctgatgcctaatcccacagctccccattttctgagagaccaagaaccatgatcattgcctgctgaatcggccagggcctggccactctgtgaatacacgatcttgcaatgttgggttatgccagcccaaagacatttcaagtgcctgtaactgatctgtacatatttataaacgttgatctggaaactg

SEQ ID NO: 307 - DNA, 2118 bp, Rattus norvegicus
  misc_feature: Incyte ID No: 218964_Rn.1
  unsure 1256-1278: a, t, c, g, or other
ctaaaatctgcatggagaggctttggtttaaataagtggaccacattcctcactgagactcctctgaggaatgtgttggcatctctggttttacttcagtggagtggctcaagaaaaggtgtgtggtccctaatcaggcctatatcaccagcctgagacccctgaggacattttctcaacatcagacctcagcctgttgctttcttccccaaagggaactttagtcagagagggtggttgcatcgtgagaagcaccttttggaaaatcctgtgccaaccagaagtggaccaaactgtgcacaggtcagtgtcatgtcttcaccaagcagctaagagcacctgacaccttagtggtggtcaggtagtattgttggcaaaaggcaaggagaagcaccattttaggtcatagcaacagggctgtttcattgtctttttatttaaaagtttgccagttggggtcaaataggaaaaccctgcagttctctgtggagagggagaaataatactctcctcctctctcacctcttcctccaacccaaacccagctgcaaatccatttattcggtgaagacggatgcttcaaccctgggtcacaggtcaccctggcagtggtgagggcagagcagaggtaggtaaccctcggtaggtgaccctcggggctccttggccggcagagggcactggggcatcttccccaggcccctgggactcagctgtgcttcaagtcacacacagagcctggattcaggccctgaagaccagggagtggttgaccctttcctggtaaaattactttgggaaatttcactttaaaaataaaaaaggcacagctagctcttttgtcaagcctgaaactaagtgtacctcacaacagatgaacgccacttggcaccctttctaggaagacatcagtattatccacattaaatgtcacgatgctttctgcactgaatgaaaaaaaaaagtatcttcatagctctctcttaaatactgtgatttctgtttgttttgttttaacactctgatacaattcattgactagcttgtgacaatgtgtctaatcaccagcacctagactcttctaagtcagggttcagtacagcgtatgttcagagctggacacagcgagcgagccagcgaggggaagcccaaatatacagctgcccaggggtgtgcaccccttacctgtcactgcccctgagctgtgcgcacgatctcctcccaaggtgtgaatctgctctgttagtcactttggnnnnnnnnnnnnnnnnnnnnnnngtgcgagtcaatctgtttatatctctctctgccagcttggttttcctgaaccctggctggaaataccatccttaccctgctgtttctatcgaggctacagagtaggcctgttggattaatagctctccactgaaaattgttagctatgaattattaccaaagaactgtggcgatctgagctgttccattgagtctccgtgtcatttcccatgtcctggccacatttcttcttggcaatgtcttcctaactccctacaaggtatacaacggcaccatctacattggaaccctagtgggtagagggtctgacagacacacaggtaggacaagcacatttccaaagcaaggtctgtagacctgcattcctgccacctactcactaatgtccttggtgccatcctctcagacctgggagcttgcagcccttcacccctgtgatactaacaggcctgaataagacttgtcgagccggtaccagcatcctcacacacacaccccaacccccagcttgttgtggatacagggctcgccaggacatcaggaatcagggtgaacacagaagggcaaatagaattttctagtcacatgagctgattggttccgggcaattagaaaatggctataacttaatcttaatttaaaaaagaagaatcgagtcttcgttttctccgtaggaaaccgaactgactgtatgcattgatttatatcctgaatttattggaacctgtatgtttggaacatcctactgtaagctgaggaatgtaaagagttaatttcagggtacagttacgccttaatggttttaaaaataaataaactatttttaaaaattaaaaaaaa

SEQ ID NO: 308 - DNA, 1323 bp, Rattus norvegicus
  misc_feature: Incyte ID No: 219039_Rn.1
ggcacatacctacagtctggtaccatagaggctgaggcaggagactagtgactttaaagtcacactatgctatgtaggaagactctgtctttaagcacatacaagggtatccctcagttgttttcttttttaatttccgggggaataaacacaatttaaagattacccactattgagccaggcagagaatgtcctcagagccagagtctgcatctcccttgtattcccttccctgcctgtgtcagctcccctgtgccagcatctcctcattccttccctgaccccctgcccggcagttcctggtctttgtgcaataagatacacattccaggtggaaaaggtctccccaaggccatgggaacccccactccaccctgccctgttcagctcttgaatagccagctagggctgcctctgccctcaagctacagatgtgtggaaacaggagagagcttgctactcagacttccatgtttggaggctcccagaaggccttggggtataaccatggccatacctcactgcccatcctatagagccaggaggcccaaaaaggcaggctgagatgttgggtaaaaccatgcctgcacctcattgccttgcagggctatgcacattcccacatgcaggcaggtggaggtgcctttcaacccttagtgtgacctgggctggtgttctggaagcctcagcgctacactgtcacatcgttcatccttgacggagggatgcttagcacatccttctccctcataactcacagagcaggaaggcagaagcaatgtcctctcaaagctcaggcctgagtgattcccacatagaacaccctaacaccttttttttggatgatgggggtatgatgtcagtgttttgtgcatggaggtgaactcttcatgaacaaagccctcgaagaatgaaacctgttactcgtgtaatgctctggtttatagctgcccattcctggcactgagctatgtctagaatctctaccctatgtgttgcaaaccttgggaccaattggtccaaatggggcttgcacctgtgggggctggctccgacccatgcttagtccttcctcagagacctcacctccccagaggccccctggtctttagagcaaagcaccgttggccccactaataccctgcctgatagcagagaggggcgagcctcaggacattaaggtggtattagccaaaatataccagcccctgtgtgctgtctccctgtcagtgtgtttgtggacatgagcactgtgtagctgtgtctgttctgtgctggtctgttgacttctatgagttcccgacaaataaatattttcactgc

SEQ ID NO: 309 - DNA, 591 bp, Rattus norvegicus
  misc_feature: Incyte ID No: 219052_Rn.1
ccttgacttaaattttaaaataggacggctcagtaattagtcaatgtttaaataaggacttagagtctaccccctaaccattttatgcagtaatgtttccactgagatgactctaaattgggaattaataagcacaaatagcgtgggctgggggaacggcccagcgatttaagagcttgtacctctcttgcagaggaccaagtttggttcccagcaccacccatattagatggctccaggatctgatgccactgaactctgggccctggcactcacatgcacagtgttcttaaacataaatgtggaagtacactgagaaaggttagagtactaggatagtgggctgaacctcacctagagcctaccactgaggagctgtggccatgtttcaataggagagcacttgcctagaacccctcgggtctggggcatagtttagtagtggaggacctgcctgtgcatgtctgaaggcctcaagattctatcccaactattgcaaggaaacagtcaccagactgaagacaatatcaaatgtaagacattgtgtgttgaaatattttatactgatcaataaaaatttatttcacctgt

SEQ ID NO: 310 - DNA, 1795 bp, Rattus norvegicus
  misc_feature: Incyte ID No: 219736_Rn.2
attcaccggggctgcacctcctcatactcctaactccagcccagccctggaagtcccaagtgagcagcagtaaatttgtgaactaatgcacacgctggctgacaaagttgctgggaagagagagtcgatgttctttggtgagtcttatattcacagggtcacctcggagcactctatatctgtccagccagctgcccgacagccttctctgacgcatgcgacctggtatactagcagggttctgcacgctgctctatgagctggtctggagagctggctaccacggggatcttgctagggcagaatggctctaggactcttctcagagatggaagtggttcatacggcatgtccctgttgcagagtacagtcgtcatgcaatagagactccacctgggctggcttgcacagctgcatggggctccatggagccccctgtaagccagtaccctgagattcctggcccagaccttgggtagggggctctgtcgtgctaactagacacgctaggtccagtagcaaagaccacctcagagatccaggaaccggaaggcagtccttgcttccctggacagtgttctccttctgggattcctccgtcagctttattcgaggttggcctcccacggacaccagcttgtagacacagcccatagcaaggctgttgtgggacaagctgaccacatttggtgccaaatgccgatgacattcacctcactgccctattaggctaagcctttccagctcctttctccgtcaatgttgttgctgactgcaatgggaacgaactctagccagggcatctggaactcagcaccaacagttcgaaagatccgtcggatctcctctagcctgctgaagcaggtcaccgctgtccagcctcacacccactgccctggtagcccagttccccaagtgccagggctactgccaggaagttaggaagaccactcctgcgtacgctgtaggaatctagcaggccctggaaagcccgggggaaggccagcgcataggccacaaatgctgctcgttcccccagatgtggctcccgctcctccagccccaagtagatgcacacatgcttcagccacaaatttacactggcaggcaggtccacggcagggccctcactagaagctggagccaacatcgggtcagggggtacctcactacccaaaaatgaagtgatgaaggagtgggccagggtccctgccacgggcacacctctcagttgtccagcaagtgtgttgctgctgctgtcaaacccacccaggtagctgtaaatggaggccgtgaagcccccatcgggaccctgagctcgccgcaagcccatctctagtagtctcttgtccggtcctgcaatcaagcgaagccgagcagcattggtggctacgaggctagcgtagctgaccagacacagcagcggagtctctagcagctgtaccagaagaagaggccccgacacctgcagaagtggcacaccagggaaagcgagggaaccctccggcagggctcgcaccgacacccgagagcagtcaagggctcgaaggtgctcgaagaacgcagggtcagtgtctgggggtagcactgaagccaggaactgcacatctgcatcgcgcagacggaaggcgcgaagaaagcgtatacagtcctgcaggccagcggtcagggcaaaggaacctccgaaggggcagtggcggaagaagagttcgaactctgcttcctcacatgcccggcccgcacgccagtatcccagccccattgtagcctggtagaggtcggtgagcagcggccg

SEQ ID NO: 311 - DNA, 1519 bp, Rattus norvegicus
  misc_feature: Incyte ID No: 220021_Rn.1
cacatcatccccactgttgccccctgatcggtgggccaaaaccttctggggctgagcaggtccccgaagcccctttgagcaaagctgaagtgccagtaaccatcgttgtcaatggacattcagagggctcagccctgcgcattggagtatcccacatgaacctccaggccttccaagggcccctaggtcccctcccctgccccataccacaggaagactttccagctctcggaggcccttgtccacccaggatgcctcctcccccaggcttcagcaccgtggtgctcttgaagggcacaccacctccacgcccatccccaccaggcctggtgcctcccatcagcaagccaccccctggattctctagtttcttgcccagctcccactcaacctgtgttcctagtactaccaccatcaccactaccaccaccaacatgaaagcaccccggctagcacccacagcaggagcctacttagttcctgagaatttccgggagagaaacctacagcttatccagtctatcaaggactttctacaaagcgatgagggctgcttcagcaagtttaaaagccattcaggagagttcagacaggggatgatctctgcagctcagtactacaagagctgcagggacctgcttggagagaacttccagaagatcttcagtgagctgctggcactcctgccagacacagccaaacagcaggaactgctgtctgcacacactgacttctgcagccgtgagaggcctcccagctccaaatctaagaaaaacaagaagaatgtgtggcagaccagcacccagcagttgggcctggactgctgtgtgtgctccacctgccagcaggtactggcacacggcgacgtcagcagccaccaggcactgcacgctgcccgggacgatgacttcccctcccttcaagccataggccaggatcatcacgtagctcctgtctggtgagagcaagagctgtcacaccctagcgcctcctttctccttccttcctcttcccagctgcttggcagctaggtagggccctgggaaggttgaggctcgggcctctctggttagccaggcctgccaggtggacgtcaggaaaggtctgccctgtgcaccatcatgcataagttctgtcccatgcttggctgagggtcagtcttggtttgtgatcttatggttttggagtgtgccaaggggagggaaaggctaggaatgactaggacctgagctagaagcctcagtggcactgaagagcgttcatcctgtgatcgaagccataatagccccagagctgacagcttcgggtcacaactggtgactggagtcagatgtcaagtgtgatagtgtaaacaattggatgtttcatagagtatgttcacagattaaaaacagacacaaaattgtgctacttgaagttcaatctttttacaagacaagttaaatctaagatctcaagttgcctctgacattttataaaagacagtttatcttcaaataaatttattttgcagtactgc

SEQ ID NO: 312 - DNA, 1198 bp, Rattus norvegicus
  misc_feature: Incyte ID No: 220134_Rn.1
ctggtggtgcacacatcctttgagcaggacatggatgaattgaaccaggcattatcagatgccttggagggacaccttcaggaggagacagtgagtctccaagggtgtatgctgccctcagagcttgcggctcgtctggagaggtgttatgatgtgagcgttaccctacatggcgaccatgctggcctccgtggctttggagtccagcctgcccgtgcggctcgccacttatctgctctgcttgttggcccccaggaccagaatttgacctttcctttggaggcctcaaaaaacaacctgtcagagcaggggctgaaagaacccttgggcaggctggagaccttggaagagaattccaaggagttccaagatgtggtgcgggccttttatgacaccctggatgctgctcacagcaagatctgcattgttcgagtagaacgtgtgtcacacccactgctgcaacagcaataccagctgcatcagggagcgcttgatgcaacgctgccagcaacagccggtggagcaggtcctctattcacgggacctccaaattctgcagggcttgacatctgtgcacacggcttcaaccgcagtttctgtgggcgaaacggcacactctacggacagggcgtgtacttcgccaagcgtgcctctctgtcggtactggatcgctactcacctcccaacgcagaaggccacaaggcagtgtttgtggcacaggtgctgaccggtgactatggacagggctcccgcggtctgaaggcgcctcctttgagggcctccggtcaggtgcttcggtacgacagcgccgtggactgccttcaccagcccaaaatctttgttatctttcacgacacccaagctctacccactcatctaatcacctgcaagaacatacacttgggcaccccctgataactctcatgttctcttggatctctttcctggacattcgacctaagaggccagcttctggttccctgctctacaaagtccgtaagcgtcagagctgcccacgagcatgctcctgccaggatgactgtggactggggaaggccagaccttatcggttccttggcctgctccgccgccaggggtcagcagaactcggcaggagggtgcaccacccggcacacccgtcttggttggaccgcgccctagcggggctctgtctttgaataaacctgtatttgaaacc

SEQ ID NO: 313 - DNA, 1008 bp, Rattus norvegicus
  misc_feature: Incyte ID No: 220178_Rn.1
ggcagggggcctgccttctgatctctgggaagggctgcgccttggccccatgaatctccaggacccctttgatctgagtcacaatgttgcagccaatgtgaccagccgcgtggctaagcgtctgcagagcagttgtggagcagcagctagttactgccggagtactccagtaccagcagcgctcctcccggggccgggactggggactgctcccacttttgcagcccagctcccctagctccctgctctctgccaagcttatccccttaccctctgccccctttccacagatcattacagctttggtgagtgtgttaagggaagcactaggatgccatctagaacagggaaccaagagacgacggtcggaaggtgccagatctaaagactctcccctgggaggggcaaacaaaagaccaagacttagtgggcaagaaaagagctgtgaggaagggaaagaggagccacagggatgtgcaggggaccacagtgaaaatgaggtagaagaaatggtaatagaattgcgagagacacctcaggactgggccttgttgcactgtggaccaccaggggagttgcccctgatgactgcaaaatgtctagacaagactgctgagcagaatcccatggaacctgagggggctggagaagggtcccccggtgagacagagaaggaggcttcacacccgtcatcagtgagttggcgctgtgccttgtggcaccaaatatggcaggggaggcggcgtgcccggagacgagattcagcagcaaaccaaggaagaaggcagaggaggtcccagcaccggagcagagtggctggcagtggaagcaacgagtaacccaggaactgaagggaccaaagagtgagcagcagaggctaacagggggagcccctcctcacctttgtggcatcggcctcccaagctgagcagacaactcaactagtggcacccctccaggatccccaaggcctgttacctggtcttcatcattttctacaggttttta

SEQ ID NO: 314 - DNA, 370 bp, Rattus norvegicus
  misc_feature: Incyte ID No: 220273_Rn.1
gcctccatggctgtgtttaaagtccacctctggggaacacagactgactgttccgataagcccgggcacggggctgtgcgtgtccccgggcgtccagggaccctggctggggttggggacaagagcagcagcgaagttctacttgtgcgagcaagatgaagctgctctgtgccttcttcctcctgtggcttggcctggtaggcagcctggctcagagtgaccccagccccaagggagaggagtcctactctgactggggcctgaggcagctgcggggcagcttcgagtcggtcaacagctacgtggactccttcatggagctgctgggagggaagaatggagtctgtcagtaccggtgtcgatatggaaa

SEQ ID NO: 315 - DNA, 1260 bp, Rattus norvegicus
  misc_feature: Incyte ID No: 220610_Rn.1
  unsure 519-537: a, t, c, g, or other
catttctcattaaccttttatttttaacttaggtttacaataaacaaaaaaagctgatcattaaaaaaataccatagctgtcaatttttaaaatggggttcatgttttaaagcattaccactatatcctgtaattacatcctttatatacaagaattgtgtgcaaagtgctttcaaactataagtaattctgatttataagatacaaatggttgtccttaggagttagtgacacttgactacttgcaatgaatcacaactggttacatctttgatttgcattttatttatgtaagaaaaaaaagccatcactttatcataccaacttcttttgtaatttaaaaccactccacaggtctaaagttttccataataattcagttacttgctttttttttttaatcataagcaacagctagtagatcattttaggcagataaaccaagttgtgatacacaattttaaaatgaagttacagttttaaaattttttcttgtaaagcaaattaagttctcatacnnnnnnnnnnnnnnnnnnnttctatattctggagatggattctttccctcttactgaaaataattcagtacccaatgctaatacccccagcatcatttagcatcgttaaaaacaagaacaaattaaaatgttttactatccaagctggctaccctggtacatgcctgtggcccagaaactgaaaagcagtagagacaggaccatcaggtgttcaaggtcctctttaactacacagtgaaccgggggttggcatgagctaccaatcactatctccaaaggaaaagcagaaaagggtttgctataaagttcttaaattaaatcttcaaagcataaagtatatttcctagcacaggtttgggtaagtacacaaggaagattatttttcaaatatagtctcccaggatctaaataagtctaccttttgttctaatggctagaaggaacgtaagtttccattagttaggcattcgttaatcacatggacgtagagacctgtggactgaaggtacttctgataccttgtgaagtataccccggaaaactgaggcactaagaggttaggaatccagactgtcatttaccacttggagaaaaaaggattttcatgcgattgttaccttagtaaaaacagtataaataagttttcattttattgcaaagcaccctatgaagcagacagtagatatcctcacttaaagaaaaaatggttccagaggatgaagtgggtgtggctggataaaat

SEQ ID NO: 316 - DNA, 1998 bp, Rattus norvegicus
  misc_feature: Incyte ID No: 220648_Rn.2
  unsure 648-703, 1650-1673, 1764-1827: a, t, c, g, or other
attttagattattctgtggctctcagaaggtggccagggaatgggggaagcctaccaggtacttctgagaaacttgtatattaccagcactgggtgtaagctggctagtacatcctgttggactgtcctgttggagaggccttgggcgtgcatcttgggctgtgtgtgcctatggggaggtacaggcaggcccgctgtaggtcatgtgtctaaaagaagttctcatgccgttggccggccaactctaccaaatgttcctctttctgtaaagagtgtacctccaggtacctgtcacaggattggatccccttaagctctggggtctcggcgatccagaccacctcttgtcaggattctgtttacctgtgagtgtttcccttccttggccagggacttctcagtggtctcatgatgaacggtccctcctgtgagtgaagccacagatgggaggcggtctctgtgctctgccactggcaatagtcccccaggctctcttgagtaactttagttaagtttctaggatcatttgcctccctatggaaaatcatggcacttctttatcttttatttttaatgtcaatttctggaccctttttgttctctacactttcgaggcctaagttaatttagctccattttctttttctnnnnnnnnnnnnnnnnnnnnnnnnnnnnnnnnnnnnnnnnnnnnnnnnnnnnnnnnggagctggggacagaaggcttgtgtcaccatacctagctttacctcaaagactgttctactccactttttctgagtccttccatggtctcctctcagctgtctgcaatctatctataattcatttgtgtgaaaagacaacattaacagtgaattcaaagaccctaactgagccaggcgctgtgatactcacagcctcagataactgaaaggccaaagtggagcatccttgggtccaggaattcaaggccaacccggacatagcggaagccgggagatacacgagacgttacacaccttcttggttggcctttatttgcagtcacagagtcaagaagcagcaagtgctctgatgagatgagaaagagatgagagacaggggagtaccaagggaaggcagggactaacatagaacactaggttaacctcccatgacactgggttctttacagatcgggctagcctctcctcatttctctaagtgacagtggcttcaaatccaacaagttagcttgcttgtttgtttttccttgtggtgttgtggacggaacccagggccttgtataagctaagtgccaccacggaaccctgctcacagtactttcttggtagatcggctaggcctagttcgtcggagtaatcgtgggacgtctgctggttatcctccctgagaccacggtacgccggtccttcagtatctaggtttagtcagttggtcctagtgctgtcgcgtcaaccaataacatcgtatgcatttgaactcagtaattggatacttcctattttatccctcaactggggatgactcaactcaatggagggctaggagcatgtgtgccctggtcacctcctatctccagcttgctcctgcctggtaccgtggcttttattgtgctagacactcaataaatatatatttttaaagctctgtattttatatcttcctggnnnnnnnnnnnnnnnnnnnnnnnncatgttttgtctatatttctgtaagtatgctgtatgtgtctggttcccacagaggctgttaagtgggcattggacctccaggaaccgatgnnnnnnnnnnnnnnnnnnnnnnnnnnnnnnnnnnnnnnnnnnnnnnnnnnnnnnnnnnnnnnnntcaatggctaaacaatttcacctcttctaggtttgagtctttaaactcgggcttctctgtgtgattctggttggcctcaaacccatggtcttcctgcctcagccccttgaactctgagattactggcaggcatgaccaagacaagacagataagtggtttttttttttttg

SEQ ID NO: 317 - DNA, 1405 bp, Rattus norvegicus
  misc_feature: Incyte ID No: 220857_Rn.2
agcggaggcggtccgtctgcgagctcttccgacaccagcgacatgaggctgtggccgcaggagtggagtgctgtcggggccgcttggagcgagtgtttccccctgcaaggtcacgatgtagcacgctggtttcccggccacatggccaagggactaaaggaaagatgcagagcagtctgaagttggtggattgtgttatcgaggttcatgacgcccggatcccattttcaggtcgaaaccctctgttccaagagctacttggtctgaagccccatttgcttgtcctgaacaaaatggacttggcaagatcttacagagcagcagaaaattgtccagcacttagaagaaaaaggcctgagaaatgttatttttaccaactgtataaaggatgaaaacatcaagcagatcatcccaaaagtcacagaactgatcggatgcagctaccgctaccaccgggcagagaacccagaatactgcatcatggtggtcggtgtccccaatgtaggcaaatcctccctcatcaactccttgaggcggcagcacctcaggacaggaaaagctgccagagtgggtggtgagccaggaatcacgagagctgtgacttccagaatccaggtatgtgagcgtccactgatgttcttgctggatacccttggggtgctgggctcctcggattcaacagtgtgcgacgacaggcctgaagctggccctgtgttggaactgtgtttggaccaccccttgttgcgggaacgagaccccatggctgattatctcgctttacacccttcaacaggcatgggctattgtgggtactgtgcagcactatgcctctgggccagtgcctctgatccacatagtagtgtgttccatgaagtaacgtggccatcaagctggggaagacacggaaagctgataggttctcacaggtcatcacggtaatcgtcatacgttatgcctagccggatgtactgccattgcagcccgagacttctctcacgtaccttccgcagtggagcggtttgcgcgcccaggtgatgctggaccggtgacattatacctgcttgtctgatgacattgacccttggtactgtgctaggctggagtatggtctcctgcatattcatatggatctacagctggagtgtttaatgcttagacctattcctcacagttcagaagctctcatgtgctggtacctgagatctcaggccccagctccaaaggggactatattctcctgtctaccagagtctgctcagtgtgctttctgctgtcaggcaccacaggagtcctgcctctgtggcttggtcaggaggttttctcagcctcaagaagagataaatgctatcccagaggagtctaagttataatctgtaatttaaaaaatgagttaaaaggcccactt

SEQ ID NO: 318 - DNA, 1563 bp, Rattus norvegicus
  misc_feature: Incyte ID No: 220946_Rn.1
gacagctccaacgtggtgtctcgcttcccttcaggatccctactctaccaccttcagtagcttctctcgagtgaccaacttcttccggggagccctgcagccgcaccctgagggcgcctcttccccttgatctacccccgctgccagatgatgagccagagcctggctttttgacgcgtcaatcctcgtttgccgttggaaactgggggccaatgcgtcccacagtggaacgtgctcctccagtcacagaggaagaatggaaccgccacgtgggtcctgagggtcgcctgcaaaatgtccctgagttgaaaagtcggatcttctcagggggtctcagccctggccttcggcgggaggcttggaagttccttctggggtaccttagctgggagagttcagctgaggaacacaaagcccacgtgcggaagaaaacggatgagtacttccgtacgggagctgcagtggaagtctgtgagcgctgagcaggagcggaggaattcactgcttcatggctaccgaagcctcattgagagagatgtaagccgcactgacaggactaacaagttctatgaagggcctgagaacccagggctgggcctgctcaacgacatccttcttacctactgcatgtaccacttcgacttgggctatgttcagggcatgagtgacctcctgtccccgatcctcttcgttgttcagaatgaagtagatgccttctggtgtttctgtggcttcatggaacttgtgcatgggaactttgaagagagtcaggagactatgaagcggcagcttgccgcagctcctgctgcttctgcgggtgctggatcagccactctgtgatttcctggattctcaggactcgggctcgctgtgcttctgcttccggtggctgctcatctggttcaagagggaattcccctttcctgacgtccttcggctgtgggaggtgctgtggactggggcttcctggccccaatctgcacctgtctggtggcctgtgccatctttggacatggtaacgggacatcctgtatgctgtctggctttggtctcctatcgagatccttaagcactatcaatgaatctgaccatgaagctgcgaaagggggatgtgctgacacgggcagaggctctgtacaggcagctgacggcctgcccagagctgccacacaacgtgcaggagatcctggggctggcacagccagaagagcctagtagcccatctcctccggtatctcccaatgcccttgtcacccatctctgagtcccctatgcgccccgccgcacgtcctgaggatagtggccccgcatgcctgacagcagtgctggagattctgcgctgtaggatgaagatggtgcttgactgctagccctagttcgctctagaccgggttcctgaagattgacaggttctgagctccatgtccgaagcctagagcggagggagaccctgagccggccaatgaaatggaggaagtccctcctagaggtacgggattcctcgagtgcccgcccacacagctgctgccaatttgaggcaataaaccgttctcgtttgactgc

SEQ ID NO: 319 - DNA, 1885 bp, Rattus norvegicus
  misc_feature: Incyte ID No: 221110_Rn.1
  unsure 269: a, t, c, g, or other
gttcagagagctgtttacttgaacacggctgcctgcgcgcaggcagagctcactagctctgagctcttgctgcagcttctctcctctgccctggtttctgcctgacattagaaagcagcccaggagaataatcgactccccggacgctgatttcctgtgtcaccttttgatgagtgttcctgggctctgccattggttttcgcctcctctgcgacagcagaaggaatggccatctccagggttgttggcggaaccgcctgttccttctnatggcccatcattgattcctccgtggccatggtcctgtccctgatgtcctacgctctcctctggaaggctggcaacctcactgacgtacctaacctgagaatcggcttctacaacttctgtctgtggaaggaggacattggctctctagagtgttacaactttcctgagctgggggtgctggggatacctcaagttggccttgccctggctaggcttggtgtgtatggagccctggtcctcgcagtcttcgtccctctgcctctcctccttgcccagtgcaacagtgatgagggagaatggcggctagccgtgggcttcctgggggcatcctctgtgctgttggccggcggactaagcctcttcctcttcttggtgtggaagtggctcaggctctccttcctggggcctggctttctatctctgtgcctggcccaggccttactcatcatcttgcttatggctatggttatgttcccaccacgagataagaaggacaagaaccactgggagaactgctagtccagtcttacaaaggcttatgggatggcaagggttcagttccaactgtgctccaagaaggtgccagggaacccgtggctgggtgggtcctttcgaaccaccttgtgtcctagccaatgttgatctccagctcagcagacagaacccactgagcagaagactgtggtgtcaaggaacccagaggctgcttggagggccagggtacctgcggttccttaggttaccatggagctcatgcaccgggattcctgcgttaatcaaccaatcctcaatagccccgggcacatgggagtctgtcagaagccaaatttccaagctgtcttggcaaagtgtcaaactataactctgtggtggttatggcaacaaatgggacggttagaaaaaaaaaaaaaaactgtttcaacagcaagtcctgtcagcactgagcgaagcctcgctggcttttcagggcccccctgaatgggtccctggacctgacagcaaacaggaatcagctgttacaccattcttgtgactcagggatgcagacgaaaaatgtgccaaatcctggaaggtaaacagggctgactagtcaccacaaacacacagcgcgtcccctcaccttacccagactggaaaggcttagaagcacggtctttattatgtattggggcttcagtatgtatcttttcagtgtgtgtaccaaaaaaaaccctaagtggtaacgagttcttcactctgtgctcatcagtaagccaaagtgaacccaaagaaacgtggactctggtgtgatcctttgttctgtttcccttccctactctcccctacagctctacagggaccaaggtggaggccccaggtagaagggaggtgactggtggtagacaggacctatttgactcagcagtctgatagagcctcctgctctcggatatggcagggaactgtgggcagctgccagcgtgtttggttggaagggtggaagcttgctgctggactgtatcatgagggagactgttcacaggtctctttaagtctggctgcccatctccaatacccacgttctctgcagctctagttttctttgcttttagcccaagactttggtttttttact

SEQ ID NO: 320 - DNA, 349 bp, Rattus norvegicus
  misc_feature: Incyte ID No: 221114_Rn.1
tgtcagagtagggctggaaaacactttctatttgatgtcttttggctaaagacatccattactttagcacttagcaggcatcaaaagaggcagagtgatttagagaaagcaatcagaacctgggagcaccatgactccttcattcctagctaaatcagaactgcctgcaacactggagaagggaacattacttgcagaacagattgtaagtcccaaatgtgaatgactgccagggtcagaagggaacagggatgcaggagccaggctggaatcagctgtggtaatgatgctggcccgtggcaaacagacactgaagtaggccagacacaccttcacgctgtcttgggct

SEQ ID NO: 321 - DNA, 1230 bp, Rattus norvegicus
  misc_feature: Incyte ID No: 221199_Rn.1
tggagtcgtgcgcccgaatcaaaactgcgcctgccgtcccaggtgtcggttgctggagcccagcgagctagcgatgctacggcagccgcttcctgattggctgcgtgtggctccctcttcgttctgattggtcgggagtgatctggaggatgctgagcaaaggtctgaagcgcaagcgggaggaggaagaaacaatggagtccctctcagtggactcgtggtggttggatcaaagccgcccagcagtggcacagaccccagcaaccgtggcttctagctctctctttgacctctcggtggtcaagctccaccacagccttcggcagagcgaaccagacctccgacacctggtgcttgtggtgaacacactgagacgaattcaggcgtccatggagcctacgaccgtcctgccacctgagcccattcagcccacagccccctctgtggcagataactttctgtctagctcagacgccggcctctcagcctccatggccagcctcctggaagatctcagtcatattgaggacctgaaccaggtcccccaaccccaagcagacgaggggcctccaggccgctctgtcgggggtgtcctgcccgacgctgggtgcgttggacttgctaggcccagcgcagcgggctgtctgttggacgatggagctggagggtttgtttgaggacattgatacctccatgtatgacagtgaagctttggttaccagcctctgagggtctcaaacctgtccctgagaatggcccagccaaggaggaaactccagagttggatgaggctgagctggactacctcatggatgtactagtaggcacacaggcactggaacggccaccaggacctgggcgctgacccttagacccagggatgattgaccttggatctgagttgagcctaggtaggttacaccaatccactttgacgtgaacacagatggcttcccctcaacagaggagaacccagggtcactttggagagacagatgcatgagtccagcaaacttcacatccatccacacatgtactaggccagtgagggagttagatataagctacccaagtggatgaaaagacgggacccagagacagacaaaaggagtatgggataggctgggggttggaactgggataatagtctgggctatcccatcctattatccccagtgtgggaagagacctcataatttttggaaattaaaaccagctttgggaaatacc

SEQ ID NO: 322 - DNA, 2502 bp, Rattus norvegicus
  misc_feature: Incyte ID No: 221371_Rn.2
caggcgacaaacccaagaagaggtaccggcgaaaactgaagaagtacggcaagaatgtcgggaaggccatcagcaaaggatgccggtacattgtcattggcctacaaggatttgccgcagcttactctgccccatttggagtggccaccagtgtggtgtcttttgtgcgctaaccagagctgcaggggcatgtgacaccagaatacttctgcccatgggacagtgtgaatccaccagcactttcagactccggactcatgggaactcagaagaggaaccctgcttcgtgtgctattgttgaactagttgactgtgaggcgggagcgattcccgcttatccgctgagccactcctggacttgggtggatccaggagtcagttctgcagagaattaggccaaggtcaggttggggttaggattagtttgtttcctgtgctagatagagccttccggggatactgcaggcaggtccgggatctgagtcatgcggatagtgggtgaatttgagggaggaggacacagaacctctaatgtgaagggttgctagtttctgaaaaggttgaggggctgacggcactagccttggcctcccatgatccttttactaagtacagcataaggagctgtttgtttcagaagtctatctcccccatctcttttctccactcagactgtcatctgggagtttaattacaggtttgggaaaaaagaaggaaggaaaccatctttaaagaccgtgatgctttgtaacccgagttcatcagctgtgtggggacaattgataagaactatcaaagtgaatcattttcacaggtctacataagcatgcagctggcaaggggggagggaggtcaggatcagaagcaagctgggagggagactggaacaggtgctttcagagcttggaacctgggtcagcacagtctgggccagctatgccggtttttgagactgatcgtgacaggatacacctagttcgggtaacgggtgcctaagtcccccatttgattgaggagagaggagggagagagacagagacagagcgacagagaaagactctgaatgagacctgacgtatatttagaggaggagacagtaagtgagaggtgggcatgaagagaggagaaaaagggcaagaacgacattgggaaagcagtggcggttgggagagctgggctggttgtgtgtaagaccagagggagctgggagaccagaatcaccagggtagtttagttcacacctctgaggccagcatcttacttggattcaaagattaatataggcaagagtcccaggcttggcacacaccaatgatggttcatggactaccatggaatgatgggagaagtggagaaaaaaaaatcttgtgctggtgtgtgtcacaactgtttttaaagtacccccacagagaggttcctctcaccatgaccattggccaaccccaacagcaggccaggagtacagctttgcttctataatattcaagatccggagaaggtttcgggaccactctgcagcatccgtgtcagccttttggcctgaggcttcctggggacacacaaagacgtgatgctcagacatcacccactgagtccaaccattaggcactggtgggtagggtgggaagatggacagaaggacaggtggagaagacagtagcagttgcccatttagactcagcaccactctggagggtcctgctggatatgcagatctgggaaataagtagtctcgatttagcctcagcaattactgcttacgtgcagggtcacatcttgtgacacagtgacacttgcttgagtggccccagagatgggaagtgggaaggtagataggagaaagggccacatgcagtcagctgcatacggggcaggcatgggtggctttgcggggtgcctctcctgccaccgaaatgccacttgaacccccaggaagcccacagcggagcccgcgaagggagaccaacaacattctgccaggcatgggagaggtgtggcggccatgggaagggatggacagtcaatgactgcttccttccctccaagtctcttcctcgccaaatcataaaggcaacaaagcaaagttcgtctggcctggtgtctctcaaagtctggctaagaagttaatgcaaaatgtccaaagtcaaaagctactacgaggggctgaccctgggaactctgaccaggtttgaaggtggaacattacaagcaccactggagcaatgcatctaggtcacatcccctgtgtagggactcttggttcatgtagagccatggttccttcactagcaacagaaaacatcaggttcctgcatgcaagacatgttccttttcagcattatatatcataggttattctcatgcagtccggcatgcagggcccacaaccaccaactgcaaactgagtttaagagcttggcttccccatctattggcttccataaccacttcctctgtatcccttctttgcttttagtgtaaataaaagttccagcttgtcta

SEQ ID NO: 323 - DNA, 1563 bp, Rattus norvegicus
  misc_feature: Incyte ID No: 221806_Rn.2
ggcgggcttttgggaccggcgccttctccttgctcctttggggtcgtggccttgctccctacccggcaagggaagcgtcctgagctcttcacgcggcaagtgtgcgcgtggcgctgcctgaggtgctcgtaggtccacgctcaggtccacgctcagactctgcggggacagaagctggagccatgggcgggaccgactagcacccgccggtgtcaccttcgaggcggacgagaacgagaacatcacggtggtgaagggcatccggctgtcagagaatgtgatcgaccggatgaaggagtcctctccatctggctctaagtctcagcgatattccagtgtttatggtgcttcagtttctgatgaagaattgaaaagaagagtagccgaggagctggcattggaacaagccaaaatggagtcggaaaaccagagacgccttaagcacgccagggacctagaaagagagaaagctgtggccaatgagcatgctgaccagagctatccttcaggaaagtatatccagtgaggagaaccgcacaaaggtgaagcatctggctcggctagctggaagagataagatcgaatgatacgggaagcagggatccgttctacagaagagcagctgtccagactggaggagaggagctcagaattctacaaagttactaccgaggaatatctagaaagctggttgaaaaggtggagtccaagttcaggcggtatgaatatcatccagtctgtgcagatctgcagaccttaaatccttcagtgttaccgtcagaactaccctagcagaccctctagctgctctgctctggccataccaatacatgcactgtgtcaacctatgccataacagtacatgctggagaaagggaggctaaagttaccctgagaacatgcgaagtgccttcaacgttaattccagaggtggaacattttttttttcgtagtctgaaaatgacccaattaaagagaagaccactaaaaacagacaggcactggaatgtggaatcaacatgaatcataacgtgttttgatcaacagtttaaaaagccacggtttagatcagtcatcagagaacactgttaagtgttaatgaaactacaaaatgaataaaagagaaagaggtccaccccacctttttgttctctgtttccaatttctactgacataaagtgttctcttcactccaggctccagcatttagtgacttcaacctatgagaaagactgggaggagggacattaaattatttcaaatatagagatcagctagaaagcaactgggatagggcagcaagtatcgggtggcctgggctgtgagagactgggtgtgagcctcttgactatgataggagactaattccttgtaacttatgatgattcttccaagacagtacagacaggagagaaaatgtacctctttactggaataatgtttatgaattgtcaggttaaataaggtatttttgtcaatataaaggcaacctttggcttactcaactcaagtagtgaagactgacaacttcactcactatcaataataaatctattttctgac

SEQ ID NO: 324 - DNA, 1228 bp, Rattus norvegicus
  misc_feature: Incyte ID No: 221854_Rn.1
cccataagggaggtggtggccaggtttctaggtgctggggaggaactggagggtggagggacccttggtcctgatgggcaccttatcagcaagtgccagacaggaataggccttgcgtgagccttgttatcagcccgagagtccacaggacacttgggttaatgtgtaaccacagggcttcccctctgccctctgaagccactggttcctaaagagaagtcactcaacatggatgctagaaaagagggactgtccctggagatactccttttcagaccaatacccagatgctccgcagtaggctggcccaccttcatcgttgcctgctccctctacttcctcctctggattcctgaggaccagccatcttgggtcagtgccctggtcaagtgccagcccattctctgcctggttttgttcctgtgggctgtggctcctggtgggagctacacctggctcctgcagggagctcttacatgttctgctgttggagatgcctgcctcatctggcctgaagctttcttttatggcatggcagtcttctctgttgcccacttactctacctctgggcttttggcctgtctccactgcagcctggattgctgctgtgcaccaccttggcctctctgacatactacagcttcctcctgctacaccttgagccgaacatggtcttgccagtggcagcctatgggctgatcttgaacaccatgctgttggcgtggccttgtcttgggtaggagtgctggctggggtgccgtgctctttatattctcagatggtgtgctggcctgggacacttttgtctacactttaccttttgcccgcctagtgaccatgagcacctactatgcagcccagctcctcctcaccctgtcagccctcaggagcccagggctcaaaacccactaatgcaggacccagacagcctggtactccctcccataagaaccttggctttccacactggcccagccctggacaagtgaatgcttctgatcatatgtgaacagatatgtggccgaccctcttaaacatctgcctgcatactgttgtcaggatttcaaatctaccactgatttcaagctgccttccctggcttctgactttggattccaggacagcccaacccaagccatattctgttttcccctccaccatgcccacttccttttcccagtcagtttttcctatccacctgccccttaacactgttcccaggtctgg

SEQ ID NO: 325 - DNA, 1501 bp, Rattus norvegicus
  misc_feature: Incyte ID No: 221985_Rn.1
agaccagcttaggcagtatgtcaagacctgatctcaaaggaaaaggtgaaagaagcaaaactaggtaatcttatctctgcggagaaaatgtgaagaagtatacattcactacttcattttcccaagtagagtgggcatcatttttgaaatgaagcagataacaattatctgaatatgtttcttatatatttggttgtgagcctagcctttaacggctgagccatctctccagcccgactaatgatttcctaacagctcagcaaggcactcacacgagagtgcttaagacatgatccccagaggcaattaatcactactggatctagtatcttgctactgatgtctaacattggtttatttatgccatagactgtggttgtttgccctgtgcatgaacatataaatatttatgtgtgtaaagcttttccagatagctctctgaagagttgaacttttaacttctgattgtttttgcattgctatctgaactaaatttgagtaacatcagctataacataaagctatagattcttacatgctttgataatatcccagatatctatgttgtttttacattgtgtcaaacaggcaaaggaaatttagcagaacagctaacacaaaaacgagatctagctgaataggacacaatcctagtccacctatatgtgtcatgggcttggcaacataacacgactggccacagttcctacagcattctcagacaggggacgtccctattgttttaacagggctgcctctggaaatggaggcttgacaattgctttctagctgactcatcacctaagagtgccatgccatggttggggtattggactccctggaacacagtgaaaaacatgaatgaataacataaccaatgcccagtgatcaagtgctgtttatctaatactcctccagaagaagaaccaactagaagctcagtttgtaacacagctgaagaagagatatatttctatatgttgcgtgatgaaaccagtcttatggccttacactcatgtcttatctcttctaaaatgcctgacttccttcatatttttccagctccagaccacacacctgaaacctgtattatgaatactatgaagtcacaaatgtgccataaagatacattgtacattggacttggaatcactaaagtgtagtacactagaatttagtggaggttttatttttcccaaggtgtaacaggccatgttcagtgtggtataaactaattaattcattcagatgtattggtgggacttctataaatggattgctactagattagcaaggaccaagcccaaagctgactgactgtgaatacttagaactggagatgaactacattctacatttgtgagctgaatgacaaagcacttgaacagagatgatggcgtttaagattcccgttatgtatcttagctataaaaatgaaaaagtgttggttggtcttaaaatctgataaatttattttataagtgttacaactctaataaag

SEQ ID NO: 326 - DNA, 1659 bp, Rattus norvegicus
  misc_feature: Incyte ID No: 222056_Rn.1
  unsure 1564: a, t, c, g, or other
cgcgatctagaaggagaagtgggcatcggcagagcccccgtctccacgccgaggggaggggagcaccgtcaccttccattcgctgtcctgcctggcaggtcacatttttactaccagctttagacagaaacgccgagcctgcaggctagtagacgcatcttagtcagaaatgacaagctactgcggagtcagggtgctctttccacaggacagcagccattgtggagtgggtcagagccggaggcgtcccttcctgttcaccaaagaaacgggttctgctgacctcttagttgtccttcctgtagggttcctaccgcatcgccatcatacggccccatctccaccttgttccacgcctttcacgatacacaagcggatatgtacaggctctagtttagattatggctaactatccgcatctaattaagatagacagatgaccacggatgttgccttagccttaaaaattactaaccgtgttaagccacctcacttcacacacttgaggacccgatttgaaatctgtaaaggcagttcctttgggagcagcatcctccaggttaaaccaaaggcagctagctaattcctggtccttgtgaggagcagctagggagacccggggctgggttctccgaacgcggcaggtgggccaaaccactgggacgagccggggctagtgtgttctgtgccttggctccaggccggacttccagtggggagagccagctgcacggcctggcttcacagaggggacaggatagacctgaagccagaaagggagcgaacatggagaagaggctcttcatccaaaagggaaaaatgacgactccacactgctttttagacggttccaaattcaacatctttctggaaaaaattatattttttaacagaatctttttattatttttaaaagatataaaactgagctactcccattagtagcaatacaaggttatgcattttaaccagactttctcaggccgcttttggatacctttagtaggtaagctattttgtctaaccctcctgtaaatacctattgcgtaacagaccaacccctggggagtacccaccaagggcaccttgcacctctcccccggcgcaggcattcacccaccatgaggctgtgctgatcaccgtggtaagacagtacccccctgctgttctgtgtctgtttcctgttaatgcttctctggggataggaagagaagtccaccattcccaggaatgtctgtttgatacagtcaagcttgccagtaaaatgttctgagacacaaagaattgttgagtttaattcctcatagccttttttgtcataggtctgaccaaaatcccttccctgcacacaggccaccatgcgtacatattgttccatacacaggttggtggtctgttcgcttaacatctgcaaagacacaaagggagtcacggctctgccaaggcgtactcccctggagggggaatacctaagggtaaccttctggcgtctgtatttaccgtacgctctgctactacctggagtactgtgactgttcccagaaagccaccttaaaacgggacntacagcatcacatcagcgtgtcgcaaacctaccccagtgttctctctcaaaacaccaataaatccgcttccataaagggcactcattgtcccgac

SEQ ID NO: 327 - DNA, 1502 bp, Rattus norvegicus
  misc_feature: Incyte ID No: 222128_Rn.1
caccagtgctggccctcagcctgttcctggcagttgggtcccttgttgggtatagtcgctttccaaagcaacaagtccgtcaatgcactcctgatgaccattacagggttttttattggtggaccatccaatatggttagctctgctatttctgcagacttgggtcgccaagaactgatccaaggaagcagcgaggctctggctacagtcacagggatcgttgatggaactgggagtattggtgctgccgtgggccagtatctggtgtctttgatccaggacaacttggggtggatgtgggtcttctacttttttatcctcatgacaagttgcacaattctgtttatctcaccgttgatagtgagggaagtattctctcttgtgcagaggagacaagcgcccatacttaatgagtagcgggtacccacaagagggaacggactggaagcttatgagggcccataggtcttcagcccactcgtgtggagttatctaaacactaatggagcctcagcttgccaggcatcctgcaacactgccagctaccccagacactggcaagcaagggccgaattatttttgtacactacagcagtcacggaagatttttattacatttgtggatgtactgaagggaaagtgaagctgccagcatctttgttgggcttgtcagcctttccctctgaccttaaatactggttttggtcctggacccttgttcttcagccttaatcaagagctaagtgagcaggaggcagaatcatgtaagtttatattggcgaggagactgaggtacgctgtgctgatgccacgtttgcagagtgtggatcacctaagcatcagagcagagcggagtccagacgatgctgcaggcctgctgtggacagagcgcaccttgcagaggcggaagatcacaccctgtgatggctgggttactctgtcgctaccggaagtcctcgtcctctccagaatggcagtttgcttgttctcctccgacttcactctcatttgactgactcctaggagcagtcttctgtttgtgaactattaagttattttagacattccattatggaactttcaaccccacattcacagtctaggaaaggtaagaccctctgagaagctgttctatgtagccttattgttgaaagattggtctctgtcacagtcacagctgagttcctggagttacctttgcagaaggccaggcttagagaaaagacaaaggcaatttgtccagggggtgtgaagtttatgtactgaatcatgttagtgtattgttagggcccgaggcctgcctttttagaagattgtagagtgtatgttcaagatgatgaaggtcattctgtacatacattttaaattatgtaaacaaactaggaggaaaatgtacaattttgagggacacctaattcattttgggtttggaaatattcttccacctcttgctttatgctccaaaatgtatatttcatgtacttgcaaaaatactacagatg

SEQ ID NO: 328 - DNA, 1103 bp, Rattus norvegicus
  misc_feature: Incyte ID No: 222370_Rn.1
ggatggggagggatgaaaaatggggtgagggtagggtagtgagataggagagttgaagacaagggcttggctgtgggagagaagattgcaagctgggtaggaatataagggagcctctgatgccaaacctagaaggaagccaagccggggaacaacactgagatccagccaaacgggcaacagagagaagctgggcaccacttcagcgagacagcagagcagagagggctcagtggaaggatgaggttagacctgcacgctccaggagaccggagccattgttaggttataacctggcttctcacttccccactctggcattttctttggctgattcttggcaggctgtgctgagcaatggcttttactgactagatgttgagagcccaaatcacgacagtcaaaaatgtctccttgatatagccaactgtctcccaagtgacaaaactctccttgattgagaccacggaggacgttctagttaactcactggatggaagggtgtgctactctggtgatgggagggtcaactgggatgggcagaccagcctgttgggacccatctctggatggggactgacgtgccctagacagatgcagctgccactggactgacaatccttctcccatcttctccccaccctcctctagccgagagcacagcttcttccagggccctttcctccatgctatggcttcgtggccatgcctctcctttgggctccctcttggtcatggtgccttggcctggcagaggcttctatgtctgcccgctgtgccatctcagtgcttccctggctccttattctctgctcatggatctctccatcgatctgtcactctctcctgtcgagcgtgtgccatctgttcactgtctgggatgctggtctcacatgcagttctggatccagtgccaccccctccggctttgctatccggctactgctgcccatttgaaatgcgttagtcgagttcagagggggccttaaggtctgagcgcgtgattcgtcattggcaaattctccctctgaaaaatgcaaggatagaaaagggtcctggcagcataccgtcgtaagctaatgattaaaactatccaaatatgc

SEQ ID NO: 329 - DNA, 1185 bp, Rattus norvegicus
  misc_feature: Incyte ID No: 222562_Rn.1
ccgagatctcggatcctcgtgggcagccgcggcggtgctggttgagtgtggtgccgtgtggggctccggagtggctgtggcgcctcgcctggtggtgagctgccgtcatgtggcaccccgggaaacagccagggtcttggtacactcagctacacccaggaatgtggcaatctggggacgagtggtatttgccactcaggagacctctccatatgacatagcggttgtgagcctggaagaggaactgaatggtgtccccgtgcctgtcccagctgagcacttccatgaaggcgagcctgtcagcgtggtgggctttggcgtgtttggccaggcctgcgggccctcagtgacctcaggcatcctgtcggccgtggtgcatgtggatgatgccccagtgatgctacagaccacctgtggccgtgcatggcggctccagcggaggacctctcttctctacacgctcgggggacctcttgggcattgttgctagcaacatctctgtggactacaatcacgtggggtccacgctactccacacctgaacttcagcatccccatcaccgtgctccagccggtcactgtaagtctagtatcagtcagagctggtgacctgtgtggcctccagagagctggactcacaccactgagcctgtcagggtcgtgtggcggctgcagcggctccctgcctggaagcctcctccggagtcaagctctgagagctgtgccttcctggaagaaagctagaccactctatgccatgggaagtgtgtatggtgtggcagctgtgacatctaagtcatctgccgggacagcccaagccccctcctacgtcttcaccttacatgagcaaacttctgtgcaactgtgggtccctgatcaacttatggggtgctatcttgagcctatcccatcgtatcccagaattagactcagcaatgccgtcgtccttctgggggttctatcctttgcggtaggtaccggtttggcatttctgtgcctcataacccctggctacccaaaatggttacactacagccaagggctcttgcctggtactctgtactacagagaactcctgcgtggaagcccagagtccatagatggtcagtaaacaggagtgttttcccgattgacaaatagtaaataatgtaggcaaataactctgagagaccaacctgggcctta

SEQ ID NO: 330 - DNA, 1042 bp, Rattus norvegicus
  misc_feature: Incyte ID No: 222613_Rn.1
gcgggcgctgggtcgcgctgagtgggttggaggctggcggcggcgcaatgaccacgctccgggccttcacctgcgacgacctgttccgcttcaacaacattaacttggatccacttacagaaactttattgggattcctttttacttacagtaccttgcgccactggccagagtatttcatcgttgccgaggcacctggcggagagctaatgggttatattatgggcaaagcagaaggctcagtagctagggaagagtggcatggacatgtcacagctctgtctgtcgcccctgaattccgccgtcttggcttggctgctaaacttatggagttactagaggaaatttcagaaagaaaaggtggattttttgttgatctcttcgttagagtatccaatcaagttgctgtcaacatgtacaagcagttgggttatagtgtctacaggacagtcatagagtactactcagccagcaatggggagcctgatgaggatgcctacgatatgaggaaagcactttccagggacactgagaagaaatccatcacccccattacctcaccctgtgaggcctgaggacattgaataaccataggcagtggttcttaggcaggtgtttccagaacagtttgtggacatatttttttcataggatgatcttggagctcgtatggaggaaagcaagcatttaagtcttaaagacttctaaacatgcaggctatgaacgttactgtgcaaatcgttatccttccaatgagcaatggcatacatgttcaactgtttgccatgtaaagttcaatcaaggcagctaagtcagaaggacacgttccactatcatggttgacatgaccaaggaaagactccctccatcctcctcctaaatcctgtgcctgagaaccactgctgcacatatataaaataataatatatattttattttgtaattagataatgattaaattgaagctttaatagcataatatgaaaatgtataaatatgagatgtatagtaaaacacattgttgactatgaatgttttctgg

SEQ ID NO: 331 - DNA, 1881 bp, Rattus norvegicus
  misc_feature: Incyte ID No: 222758_Rn.2
gcatcctgcagagataggactgctgagatggattgaggaggccatgctagagcctacggatgagacaaagggatggctcagagttctcccaggacctgtcagtctcttccgtacttccagacgacgtcacaagacgttagacagccatcattccatagaaccttccctgcaacccagacatcattatggaagatataagtagaggatcttaactgcctcacaggaagttcttgtctcccctggtatggaattcagagagttcctcgtcctttacccgtgtcaaacccagaggcttactctctccagagctggccagccagagactgttttaaagtcccctggaagtcaagaatccagtttactgataagagtaaagttgatccaggactcctgtccttttttcccactgatctacccaagtattggtgaggagcagcaagtcatggatcctggaggagggaccagtctagtctggcagtcagggctgaggagtttgggtgagaggcagaaagacaagaaagcctgggtttcaggcttgcttgaggagctacattcaaggtacattctggagctcctcatccccagcaggcagagatccacccctggctaactcttgacgactttgcggagcccctataaagtgcctctgaccaacggacacaagaggaatatcccctggaaatgaaccaagtggaaagaatgagctgtgagactggatagttatggtgcctcaagctgatccttctgagtggatggggctagcaccccagtgtccatcaagcgaggtctatccttctgagtgggcagggctagcactccagtgtccagaaattccagtcttaatgataggtcctctgaaaaagaggtgcagaggagtaatggggccagctgcttaaagcaaaagaatacccacaggccaggactgtcagaacaggttgagtcaaccccttaaagccaagttctaggtctcaagagtggcttttccatgctcagagcgctcaagactatccttgggcgctctcactccagtgcccccagagaccccagccagattgctcagactgccctgcatgaaggcaggacaggtgaactccctctggtccttatcttctatccctccatcctcagtgacatcatgagaagagtaggtgatgttgggctttggtggtagcagtcttctggggcgggggtcagtcactgtccctagtcagtcctttcctgaagggagaaatccattccacattattaacctggagttacaatcgcatggtagcacgcgactaaacggaaacgtctactcttctggattgcaagcctgaagacacctacgtctggggagccttgtttcttctgagccttgtttctagtacataatacgtatgggactaagtagaagctgctggtgggccaagggtgggtgccacagtttttccccaagagctagcctctttacttcagggaattctcggaaactttcaggaattcggggggcttaccctgggacggaagaacgaagaagaaggactatatgaagtcggatcaatccaacggcattcattgtgatgaaccaacgcctatattgtctattgctagaaactactacatgatgacattacaccctggtgaaattctaatcacggacttcacgcctagcaatccaggaaagtaacgactgagcccccatcagatcaatcaagcaactattacactgaggttgtgcaaaacaatcaactgggtccacaacaacatgaatccacaaagtccccaccatgcactagccacaaggggttaaaaaagaaaaaaaaccctcaaaaacagttcttacttctgtgttgtatcagaaatttttcatacaaaataaatgatacatatgtttgctag

SEQ ID NO: 332 - DNA, 1292 bp, Rattus norvegicus
  misc_feature: Incyte ID No: 222900_Rn.1
tttttttttggaatcacaaaaaatcaaaacatttattttgttttcttgcacacaacacttaaaacattcccattcacagcaagtctgctctctgggagcttacagtctctgaaacagtcaatcgtttaatgtagatcccagggatttaaggcattacattcaaattgcagacctgtcgtctaatgcatcttctctaagttggtctggaaagggcaggctcatatgtattacattgacatgatgtacccttgcctcgtcttcttccttgacttcctgcaagggagtgtgggacaatcccctaccacagaccgtgaatgaatattggatggatgttgaggacggtgcacatgtcggcaatggtgcttggctgtttcttccatcctgactcagtgcagcacctaggacctgtaactctggggacgcttaattcctacccagctctatagaaagaaatcccagtggagcaaacttaggacctctactgctgtgtaaataccagattctaattattaggtaattctaaccaccacaagcagtgctactgcatcaggaaggtgagagatgttaaacactaaactacctggggaaaaagacagaaagggaaaagggaaaagaaactcaggtatagccttccccaccagaagaaagacatttagataaacacaaaggctgggcataaagttcaagaggatgggacttgagctcacctctgttctgcactaaccacattctccagcaacctagttcagggatctcaagcttaggatttgcagtagacttatttctaatcgagagctaccctgaagaaccatgtcaaagtgaggtttctcttggtttcagattcatagcaccttgtccttgtaggccttggttgttctcacctcaatgataagttcccattgctgatagtttatgctttgcttttagggtgttagggcttaaacacagggcttgacacatgctaggtaagtgatccacatccaagctgcatctcaggccctggaagatgttttatagaagctcatcttgagattgagagagcatctagagagcaaccagggtacaccactaagtgtggtttctgtattcccctgggttttttattccctgtcatctgagatgacgagcaggctatttgcgccttaatgttgggctcttgtcagtacctgtcatttacatgcaatgctaaaaaccagcacagcaggatgaactaagagaaaagcaaagctctaaaattgatttctaagatctttagcctccatccaataggcttaaaaccttctcttggttca

SEQ ID NO: 333 - DNA, 875 bp, Rattus norvegicus
  misc_feature: Incyte ID No: 222913_Rn.1
gagaagggctacatccctgcgctcaagtgggacccgttcccctacacacggcggtgatttgggggcttgtgctgtggctctttgagtatcaccggcccactctgcagccctcactacagtcctccatgacctacctctacgaggacagccacgtggtggcacgacctctcagacttcctcatcttcaacaagagccgcccctccaagtaacacagcccaaggtgccctcgggaacttcaacggctcagacagcttccaggcagcgtcccgctgtctgctccagggtaccgcttcaattggcataccgtcatggcaggatcctgcctatcatcaaagtcatggacctcacactccaacttttattatcccaggctcccacttgctgaaggaaaagtaccgaggtttacgcctgcctccggatactgtagcaagtggctggatccagctaaggattccagatgctcttccgacctctgtaaggccagggcgagttcaaccctctctgggcctcaggtcattcagttcaggggaggaccctcagaggagagtgtcctcctgggggatacggtgaccctccccttctactgtgtatcagagggctccttgctactgggcaataggttacaaatactttgaaagggaaaaaaaaactaaattctttgtctaagttattctaccgagacgttccggacggaaccctactgtccaatgggaacgaaacatgagccattcgatagaggtacagcacgtgccaggcttgtgcgagatcctatcaccagcactgagaataaaacgcctagtgaccacatttctgagatgcattaagaaggctgtggcactagggttatgagctccaggccaggctgggatacatt

SEQ ID NO: 334 - DNA, 1487 bp, Rattus norvegicus
  misc_feature: Incyte ID No: 222924_Rn.1
gccagaggagaacccacactggtggaatgccaatatggtcttcatcccctactgctccagtgacgtttggagtggggcttcacccaagtctgagaagaatgagtatgccttcatgggctccctcatcatccaggaagtggtacgggagctcctggtcaaagggctgagtggggcaaaggtgttgctgctggctgggagcagtgctgggggcaccggggtgctgttgaatgtagaccgcgtggctgagctgttggaggagttgggctacccatctatccaggtgcggggcctggctgactcaggttggttcctggacaacaagcagtaccgacggtcagactgcatcgataccatcaactgtgcacccacggaggccatccgccgaggcatcaggtactggagtggaatggtcccagagcgctgccagcgccagttcaaggaaggagaggaatggaattgcttctttggctacaaaatatatcccactctgcgctgtccagtgttcgtagttcagtggcttttcgatgaggctcagctgaccgtggataacgtgcatctcactgggcagccggttcaggagggccagtggctgtacatccagaatctgggccgagaactgcgtggcacactcaaggatgtgcaggccagctttgcccccgcctgcctgtcccatgagatcatcatacggagctattggacagatgtccaggtgaaggggacctcactgccccgggcactgcactgctgggaccggagcttccatgacagccataaggccagcaaaacgcccatgaagggctgccctttccacctggtagacagctgtccctggcccctactgctatccctctatgccctaccatccgggaccagttcacaggccaagagatgaacgtggcacagttccttatgcacatgggcttcgatgtgctagacggtggcccttacagcaggggtatggagccctagctataactgtctagggatactgtagtatgcggttaacttagatgtctgcctgcagaggaggtagtaatgaaggggcccggtgccaccgtactgttcccagggtgactcacctctacttctaggctcttctgctcttcccacggagcccaccctgagtatggagtgcctgagctgtctatagccctccctctgcccacgctagaagagtggtctcgccctgagcccacgggagcccttcctaaccccgtatctgtttccctatgcccccacggccacgcttaggggggcaaaccgggagcacaagcgccagcactggatatcctgagcctatcagactcagacagtgccctcctagcctcgcctagctgatcctggtccggtttggagttatggttataaagatgacttcttcttgtaataccgttaatagttctctataaaagtaacatccgaagattatagaaatatatgatggatgatattgttttgtaacataatttttttttaataaatttaaa

SEQ ID NO: 335 - DNA, 1180 bp, Rattus norvegicus
  misc_feature: Incyte ID No: 223028_Rn.1
acctcgctttgatttggaaacacctgcagcagctggggcgctgtttagggcatccctttgagcatcaggcacggttatttagaagactaggtgagccagacaacagatttgtgtagacatacagcccagacagcagaacttcctgtagctcgtgtcttcttctgtgacgagagcaccccgaatccttggcaccaatcctcagccctgaagttacccagttgcctcgatttttctttcccatgttgcccatttctgatccaaaagcccttggcatttttaggaagaatagcatctgtaaactggaacgtttggcctctactccctgccttgaatctgtttcctgattgtcagctgagggtcgcagccgcctagggaccttttggtgcagacttgcagatatgcaggtagtggcacatgctgactgctgggtcttcactctgagggtgattttctaaaatggagctgtgctaacagtgcagcttgcccaccgaatgagaagccccatctcccaagatcataaagcaagagcttgccaagagatcgtggtgcgttttgttgaaaggcctttaaagacttgtgggatttatctgtagacttctgaggacaatagaaatatttttattttttaacaattttgcacttctgactacaggtggaaaataaatttgtattagtctgttcaggggattgagacttgaaaaatttcatatcctgagaagttttttttcccccaagcgtatacttcatgtttaaaatatttactaggaaatacatgtcctccattcattaatatattatagactaatttaacaggtgcgtttcaggaaaattcttcctagtttaataagtaaggtaaaagttttattttattttatccctttttttagtgtttagtgcttattctctacttcatgtttaagattagcccacaactattttcagtctcttctgtgggctattagaagataaacaataaaataaacaaaagacatcttagaatgttgtattgttttaatcagaatttgttttggctcttgtcttctttgatgtcaaaatagataaaattgtctgcgtctatgaattataaaccattaaccatagtttttatttttttggtttcaaacaagtaaggataaaattatctctgtggtaactaaaatacctgcaattaacccaggag

SEQ ID NO: 336 - DNA, 1360 bp, Rattus norvegicus
  misc_feature: Incyte ID No: 223085_Rn.2
gggctcagcgcgggcggtggcgtgaggggctcaggaggagacatgtcctcgggggtggccgcgcgttgcgacgccaagaagcttgtgcgctcgcccagtggcctgcgcatggtgccggagcaccgcgccttcggaagccctttcggcttggaggaaccgcagtgggttccggacaaggagtgtcccagatgtatgcagtgtgatgccaagtttgactttatcaccagaaagcatcactgccgccgctgtgggaaatgcttctgcgacaggtgttgcagccagaaggtgccacttcggcgcatgtgcttcgtggacccagtgcgtcagtgcgctgactgtgccctggtgtcccatcgagaggctgagttctatgacaagcagcttaaggtgcttgtaagcggagctaccttccttgttacttttggggactcagagaagcctgagaccatggtttgtcgtctttccaacaaccagagatggctggattctggatggagacagccatcatgaaattgagattgcacatgtgtgtactgtccagcatctcacacgaaggcttcactccctggagcaggcagcactcgagccacaggcatgttcctgcagtacacagtgccaggggcagaggctgcagcacagctgaggctgatggctggagaagacgcaagcggcagcaacacgcaggcggcagcatggcatggcagccatgcagcaaggctactcaagctcctctatgaatcacgagaccagtaagttacacgggcaactgagctccgggcacgatcgggtccacagagcccacgcagctggccctgcctgtgcatctcggggttctgccctgtgtgtaccttggaaatgcagttcacgtgtctggaatgcagagtgttcatctcgcctagtgtgtacagccgctgattaatgctttagaagagcttctgtcgcagtgcatcatgggtacttcagtagggcctgggagatatgtctgcaggatcagcactgctagaccaggtttagtgtaaccacgtcttcatgatacatttccagggttcccttagagatttttggccctgttcccacagaaacagattgggatggtgatcactcaggtccctgcgtttagcaactgggcacttccgttctcaatagcccaattcacaaatgccattagcactgtttcatagaactcatgttcactctgtcactaaaccggggaccaatggacagtccctttgctgtgtacatctaaaggaaaggaatcaagagtttcgtgttttctaaccttgacttactattcactttattaaaatgactgtacagtaatttgtatataaagtgtatgattaaaacttattttgaaagt

SEQ ID NO: 337 - DNA, 908 bp, Rattus norvegicus
  misc_feature: Incyte ID No: 223275_Rn.2
acaaaaaacctccatccccacatttcttcttacctccagacacatgggatggatgattctttgactgtggggggtcttaccaatatcagagatcaggctcattgtcttctactcggagatccaggatgatggcaggaggagctcttcctactctgcctgtacagctgaaggatagttggttggccttgccagggtgcctgaagcacaggggtcaggaaagcaataggacttctctctaatagggagtggtacgcctgtcagcattcctggtagtaaagctctgtctactccagtgttctctgttcttgtatggtctacgtgctgcctagtgcctgagtgccgcttcatctgagcaggtcaggattgacgcaaacataggattggtatcctgcaggaagagggctggccaaagccgagctgtccctcttcggtctggtgcacattagccttgttggcagtgtgtctcctcagcctgtgcgttacggtctctctcatagaaataggaacaaggggaagttaaagacagaggcctaaggagataattttttaaaaaaaactatctttctgttggtttgatttgtgcttttctgtttgggtgcaacattgtgtttgaggcaaagctagaactttgagaatattttatttaaagaagcgagtgctctggtattaaataaacctaatatgggtctatgacgagttacacttaaatgcagtctatttatattaaggaccaatattaaagagttatagataataatatcttcaaagtggtggttgcattggaataagtgtacgtcttgtcagctagattcctggtgtaaaataattttactgtaggcaagttgacagaaataaaacatcacctctgtactctatagcccattaaaattgtgtcctgcctccaccag

SEQ ID NO: 338 - DNA, 311 bp, Rattus norvegicus
  misc_feature: Incyte ID No: 233321_Rn.1
tggaaggaacaagagactagggccagtctgggctggtggcaggctggggagctgaggagttactcctttataccatttccagctttcttgccagagagtatgcggttatcaccccgatggcacaagggccctccagaatctgtttccagcaccctcttatcctcctacatggcagagtatccaaggacgaacccgtcatcaaaatacaacacttagttttgaagctggacccaggggaactgttcagtgggtgtgtgtgggtgtctccagagtcacaaatcacacattctctggtgaatgtctcccatgag

SEQ ID NO: 339 - DNA, 504 bp, Rattus norvegicus
  misc_feature: Incyte ID No: 234473_Rn.1
accccccaccccccatgaaaaaagccaattgttacaaaaatataaaaaatatactagcctctagttaacctttcatggaagaatctcagaactccggagcacatctggatcaaatgcccagcaagcatacatgctagcttttcggctttaaaggaaaagttatagagcattgcatcctgttgtggatgtggctgtttcctccacagtaaggtgcctctcgcttgcccgtgagtgttaacaacttgaagttctttttctcagttgcgccccctgcagtgtgggattctagggcaggaggctgtttccattcttgtgctacttccttctctctctggctccttaagctcccctgggtacccagactcctgagctggagtccagcactctcactgaaggacagggacggttaagagatggagaggaaaacctggcctggctttccctgtagcaccaatgtcctgggtgtgcacacggcccacccaggtgtgctaattcaaggaatac

SEQ ID NO: 340 - DNA, 471 bp, Rattus norvegicus
  misc_feature: Incyte ID No: 237271_Rn.1
gttgtgcctgagatccttgcagctggtggcagatatgacctgctgattcccaagttcagaggcccacaggctctggggccagtgcccactgctgtcggtgtcagcatagccatagacaagatattcgccgctgtcctcaacatgggagagcctgttacagtgagctcctgtgacctcctggttgtcagtgctggccagatgtccatgtccagggccatcaacctaacccagaaactctggacggccggcatcactgcagagatcatgtatgactggtcacagtcccaggaagagttacaagaatactgcagacatcacgaaatcacctatgtggccctggtctctgataaagaaggaagccatgtcaaggtcaagtcctttgagaaggagaggcaaacagaaaaacgtgtgttggaatcagatcttgtggaccatgttatgcagaaactaaggaccaaagttggtgacgaa

SEQ ID NO: 341 - DNA, 492 bp, Rattus norvegicus
  misc_feature: Incyte ID No: 239358_Rn.1
  unsure 259-280: a, t, c, g, or other
gtgaagcagttcgctttctctgctctgttgtatcagctgttgtacatttctgtgaattgaattcagcatgaaggctgccatgctgtcttcattggattacctacaccattgttttaaatgtaggaattgacctgtaaatgttaatagtggaattttctataaggaaactataattccatggtacttcagggttattgaagaagccactgatgccttctaaacacctctactcaaaagtacttctggagttcatgattcnnnnnnnnnnnnnnnnnnnnnntttgaggttttttgtttgttttctcctctttgttgacatggaagggttttccctccttcaattattttcagatatcatttgtttatttataaagctttaagttattcagagtgtattgtctgcaatgcattcttaatcatgatccctgtcagtgcgttgtcacggcaaatgagcgtgtataaaaggaaatcaattctcagaaagcacgggtc

SEQ ID NO: 342 - DNA, 299 bp, Rattus norvegicus
  misc_feature: Incyte ID No: 243242_Rn.1
ccggccgtgttctaggctctcacttatcagcatcaccatggcagtgcctgcaggatccatggattctacagtatcaagggagtgggcagccctcccacactgatacatgttgtgcctctccctggatgcttgactcctataaggtcaaggaaaaagcaaggctcataggcaaagagcccccgatctccaccagcagccttagtttccctctcaggcctcttttgccagtgttctaacctgcatcccactcaactgtgagataacaccttgggatcctttcttatcgcattcttcgcccc

SEQ ID NO: 343 - DNA, 350 bp, Rattus norvegicus
  misc_feature: Incyte ID No: 244932_Rn.1
ctttctagaccctgtaatgtgaaactctttccatctacctgcacttcagagccgagctttgtcttttaccaatttctggagctctgccctccatgctggggccccagctctccaagacaccagagctgtgctccccactttggccacttggattccggtgactttgggccacagaaatacgcacccatgcatgtcacaggataaggtgctggatcataccacaggcaatggttgttgcctgatgtcctcacctgcccttttataactgctgtcctctgcccatccgtggccctttggcaattacccatgtggccctagtcccccattgtactctgggtggcttagttgtg

SEQ ID NO: 344 - DNA, 2106 bp, Rattus norvegicus
  misc_feature: Incyte ID No: 257296_Rn.1
tgaagacccaccatgtctctgttgactactgtactacttctctggggtgagatgtcctaagacctagatcctctggggcaggtgtggcatgaatggaaactcacacactctgtctctacaggtttcactctgggcccaggaaatgctctttggcttgattctggcagtgaacctgaactacgggcagagcctcaatccttgctggaaccctgggcaaacctcacactggtctgcgcagttgatttgcctaccaaggtcttcgagctgatcatgaatgggtggttcctgagtcaagtccgactggagacaccggtgttgtcatatcgcttttccctgggggccattataagtaacaacagtggcgtctaccgctgccgatgtggcgtggaaccccctgttgacattcaactgccagcgctgagtcagtggacaatgctaagcaatgctttggaggtgacagggaaagagcccttgcctccaccctcagctcacgctgatccagtctcctggatcacacctggtggcctgcctgtctacatcatgtgccaggttgccatgcgaggtgtaacctacctgctgaggaaggtaggggtggatggtacccagaaacctgatgtccagcacaatggaactggctggctttctaatctacaagcctggtaacgacagctgcagctacctaacccatgcagtgaggcgaaccctctgagcccagtgctattgtgaccatcaatatgtctgccacacagctttcacccagtgtgtgcttaatgggaagttacctaacgatctacccccaggagacacatgagacgcttgcttgcaaagctcctcgaaaatgcagccgaattccaactcagacaaggagagagggtgctgaatattcaagggttcagccccactggagatgcgaccatatactatgtgaacttgaaggaactggataaccaaagtccttttacctgccgctaccgtatgcaccaaatacatgccatgtttggtcggaggacagcaagcccgtagagctgatgtggagtgacgagaaactaccagccccggtactcactgcagagccatcaagtcacaacctggagtctggttcaacagtgcagcttcgatgtactgcacacaaggttggcctgcgctttggcctgcaacgccagggcaaaccagatttagttgtggtgcagatgctgaattcgtctgggaccgaagctgtctttgagctgcacaatatctcaacaatagactctggcaactacagttgtatctacatggaacaagcaccacccttctcaggatctgcttccagtgagcccttagagctgcggataaatgggccagcacccaagccaaggctggaagctctgtggaaaggcaaggttcctctgggccatgaagccatctttcaatgccatggccatgtgcccagggtcagcatggagctggtacgtgagggctttaaaacacccttctggatggcttcaacaacaagcacctcagcttttctggagacatgtcttcgtcggtccccaacataacaggcaactacagctgccgctatactgacctgtcacccttacatattgaatacagggatcagtgaccctgtggaagttgtagtagaaggtagctaaaatcgctgcagacacaggaaagtgcccttggaaagggttgaagacagacataatacacattcttcgtgtaagatgacttcattttctcaggacttaataaaggtcaagtaaattgttgtttaaaacatgtctttcatttgtgggtctaaggtacctgcagatggaggaggatgttcttccaggtctgggatcctgggtctgtaaaaagaagaagctcagggttcaatcttaaggacatgagggtaaaagcctggtctttgcccacatctctcaagatccctttttcttgttgacctgtgtctggctgtctcatagctccccatacttacttcttccccttccagcacttgtataaataaagcttaaagctctaaccccacctctcagcttggaagggtttgtccctgacctatcagtaagttagaaaacaccacattaagagttctggctgtgttttcaatttttacaa

SEQ ID NO: 345 - DNA, 651 bp, Rattus norvegicus
  misc_feature: Incyte ID No: 269416_Rn.1
gctgaggacatcttctggtccatttaccacccccaggacctctcctgtccagtcttcacttgccaagttacagagagaagagtctccggtctacggttctgccttattccgctcggtcacgtgaagggggcgcatggggtggagatgaaggcaaggggagccagaggccacgtggagcacggacataactcactttatctcggcaacgcaggcgtttgtgttgagaagggcattcttcctccctaggaaagaacatctggaacattcctccaaacgaggttcaaaacaatgacttcagatgaagcagactcgctggagtaaacacagcacagaggatcccgtgaagcttgtgtgcgtggactctgccagagagcagactctgggactgaaatttcaggtcagctcagagttacacccccactctcttgcaaaaggctctgatcccatgggatactcccgggaagggccctagggaaggtctcagttgctacccaagagcagagaggaccccatgacagacaaggcaccttctgccctgtggccctattccctcctctcagaaagccttcatactcggcggtctgccttgccctggaccagacaagaaagtaaatcacatttgttgattaaaaatcagcctttgtggaatat

SEQ ID NO: 346 - DNA, 394 bp, Rattus norvegicus
  misc_feature: Incyte ID No: 282741_Rn.1
actttacggatctgtgttctgggtcttgctctgaacctgcagcctagacctctcaggctttgataccgtgggatgagggctgccgagcagcagggctgggcctaaaagccttaccctctgctgcctcagagcttgggacaagtccattcctgcctctgctggtttgcctggcccagaactgcactcagcacatgtgtccagcagcttgggaatgactacaccgaaggactccaggctgactgctgacgtcgaggaggaagcatctgggggagaagcttctggctaaggggttatcagtcctctaggttagctgactctgggtctgtcttcagactgttaatttgcttagggaaatggagcaattaggtagcgtcactgaggcgggtgggtgatg

SEQ ID NO: 347 - DNA, 804 bp, Rattus norvegicus
  misc_feature: Incyte ID No: 284850_Rn.1
ccccacccccgttcttacttttcatggatgaactagagaatgtccgtgtgtaaatctggttgctttccgcacttaagtctgctgctgtactcactagtaagccgcagcagcacatctgtgctgtgtctccctctggagcagccttatccacattgcttgccagagtcctgtggtggcctctcctgttcccatgtgtttggtggatatagtattccttcccagttgtccctaaaactgtgacgggggagtccccactcactaagcattaccagccagctatgtggcggtccccacacaaagaccttgtgtagtcccttctgcaatgacatatttattagatctatttatatttatgaaatttttactccgaagtatatccggttacaattgcacttgctgaaagcacatcagatctattttggacagtacccctgaccattctaaaactggaaaaggaaaagttacactgtatcctgccaccttatggtagccttgtctttaaagggtgaataatttggtctgggtagaatgttaatttttggatgatttttaaaaaaaatcttgtgccatgtgtcttctctgtggacagttaattgtttaatggatatgtgctgattgtgtgattcactcctctttgtgggaactaaaatattctttttagctttatattttataaactgccagattgtacaattttatgtgtattttcaaagctcatgatatgagggtcactaagttaaacggcctatttttttacctcttgtacagttttataattctgctcactgatgaaggcgacttatg

SEQ ID NO: 348 - DNA, 121 bp, Rattus norvegicus
  misc_feature: Incyte ID No: 284860_Rn.1
aatacttcaagtgggaagtgttttcgaatgttattattggttatgtgatattgctcagcacttatttttattgtaatgatatgttaaagacatgtgtggttgaatagatgttttaatcctc

SEQ ID NO: 349 - DNA, 298 bp, Rattus norvegicus
  misc_feature: Incyte ID No: 284906_Rn.1
tgtgacctaaacaagtgttaacagccagacaacagtccattcatctgattctgagagaaggacactatgagtttcaaaagtagctcacacgccaagtattcactggagtaaaacattacatctttctcatacttacataaaaatacgaaatagtaacccagaagaaaaatctgtaagaatcgagatattgtttgtcgagtaagggggcatttgaggatacttgcaatgcatttccttccagtggcttgggtggacatgattgttatgccttcagcaccgagtccatgctatgtctcac

SEQ ID NO: 350 - DNA, 293 bp, Rattus norvegicus; identical to SEQ ID NO: 106
  misc_feature: Incyte ID No: 284952_Rn.1
  unsure 46: a, t, c, g, or other

SEQ ID NO: 351 - DNA, 246 bp, Rattus norvegicus
  misc_feature: Incyte ID No: 284959_Rn.1
gctgtctaagaacactgctacaggacataggcgtaattgctttttgccttgaaaaactggctatgttttaactaatatgtctacttgtgtttgtgagctagctcgctgataggatcctgattctattcatcgacaagaaaaaattcaaaatgcagcatcagttaggctgggttttgtacaggccccctacttcacagtgatgcaggaagatcacaagttcaaaattagcttgtgctacagtgaaaa

SEQ ID NO: 352 - DNA, 636 bp, Rattus norvegicus
  misc_feature: Incyte ID No: 284962_Rn.1
ccactatcaggtttatagatattttttataaacatggagtgtatttgacttcagagatgagcttttttactccaagaactctatgtaagagctacaggcttcctttcctgtggcctccaagtctttctttacaccctactctttgatgcttccttcctagagtacttacatagccttgttaaggcttcagacagtcactgaccactggactctagtgtttgcttttgccttggccactggtgctctcctgagggcgacacgctgctctgtggataaaatggcgctttcacagcagcaatatctgcttcgtactttcggtccactgtgggggcgatgccatgatcggaggccgtgagcagctcattttgcaggacaagattcttgttgttagacgcattctgctctgtcaattgcccagaattccgcccttccgtggtcagaactgaagagctgcttcttgacacagaccgaatgacgtcatatacggctgacctcatgtacaaactacaagggtgaatatcacttctccctttaacaagggaagcatcttccaaactcttcccaatttcaggttggccatgtaaggtttttttgttttttattaactgtttccataataaaacttgatttaaattc

SEQ ID NO: 353 - DNA, 557 bp, Rattus norvegicus
  misc_feature: Incyte ID No: 285039_Rn.1
ttgagctcccaccaccacagacccacccagagccgtgtgagcgacagtgccacccacaccacagggcagcacctccacgtctctcctgttgtgatggatcgaagatccccgaaccctgagccccggagaactgtgctgtggctgcttctgaagccattctaccacagggagagaagaggctaacaccgtaggaaagggaggctcgctgacttcagggtgtgagcatgatggccgggcctgggttttgtgagcatcccatgctgggccttggacgtaggcagggacgttgagttaatgctgtctggtcttgggactacacagcctgtgtgcatccaaatggttccgtgggtacaggcactgctctgcatggtaaagtggctgagacggaagtggagtttgataagcaagagcttgccagaggggatcctgagctattttcaccatcaacccaatggaggtgttaatcctctatctcgataacggtctgtggcactgaactctcctgcagtcgaaccactgtcaggcgggccccctgctgaggaatgtcagaatcaggc

SEQ ID NO: 354 - DNA, 469 bp, Rattus norvegicus
  misc_feature: Incyte ID No: 285098_Rn.1
aacttatcttagtttaaattagatcagtagagtaggaaagaatcagattaaaaggataaaaaagaaaaaagatgaaagaagaaaaaaaaaccccaaggtgggtgttctggaatacatcaaagtaagtaggaattggagacctatacaagccactggagcctaaccaatagtctaatcagagtccctaagtagtcattcacagttttatcatgacactcaaaggtcttcacagaacactgtcccacaaatgtactcgagagctctcaggcttgccctaatgcccggctcacgtgtgcaatgcagaaggctgcaaaatcaaaactacgtgacaaaggaaattcagtgcatctcacaggcttcgataaattatgggaaaaaatcattgcatatattatcatttaaataacatctgatacacatttttgaaataattaacctgtgttcacattccatgcatcgtccggtgggg

SEQ ID NO: 355 - DNA, 408 bp, Rattus norvegicus
  misc_feature: Incyte ID No: 285386_Rn.1
aacggaaggcaatccaggccctcttctttcagaggcattttggtatgtctagggccattgttcgattgttacactctagggcttggaggcaggatgctcccggaggctgttgggtagagaccagacaggcagctaaacatcccacaatacacgagtgagccccaccgtcgagatcagtttggtcccaaatgtcactagggcagctgttcatcatagtccatctctggtactcagtacacaccggacagttccatagtttctgatagtcaccagtgtgtgtgaagaacactcccaggggaagtgagttcttcttagtggctacttgtctcaagttagcccattgtacctaacagcaatgtgcttagtggacagagcacggagacatctgccaatccactgaccgttttg

SEQ ID NO: 356 - DNA, 116 bp, Rattus norvegicus; identical to SEQ ID NO: 97
  misc_feature: Incyte ID No: 285588_Rn.1

SEQ ID NO: 357 - DNA, 291 bp, Rattus norvegicus; identical to SEQ ID NO: 123
  misc_feature: Incyte ID No: 285857_Rn.1

SEQ ID NO: 358 - DNA, 632 bp, Rattus norvegicus
  misc_feature: Incyte ID No: 286376_Rn.1
ttcggcctctcatggctggagtcagggcctcttcccagtcgccacccaggccagcccatcttcccatcatgccacctctggcacatatctgctcagccacattggaacacccaagcgtgtacccacaagcatgcagacaggcacatgcttgcacacgcttgctcacacatgtaccatcacctccacagatagggtcttgttgcatagtccaggctggtctggaatccatgattctgttttacctcctgggtgagggtatttccggcctgtgccaccacatctgggtacacgtgcatattttcactaaccttagtactcatggtaccatgccaccgtgatctacctacaagtctaaattctgtggggaaaggcagtggtaagcaaggacttctggaggagcctggactggtcacagagtggggcacgtctcgtaacccctccctggagtcatttctggtgtcatctccctgcccagcttcccgtctgcctgcctgttgtccctcctaagtcagtcccctgatcctcttttctccaccatcccaatagtgtctgtcccctccccactagactggttactggatccaaaagtctgctgaagaaggaaacagttcctgccagtaaagcctcagcct

SEQ ID NO: 359 - DNA, 345 bp, Rattus norvegicus
  misc_feature: Incyte ID No: 286511_Rn.1
ttgaggctcctaccgaaaggtcagggacctggcatggtcatggctctcagctctgtgtccactccggggccccaagctcaaaggtgctccaccttcccactactacgacatcttcctagagatatagggaccctgtgaccaggattacaggtagttctgggcgggcctccagggtttagccatctgtttctacaacagcaatcgggtcttgcagcccctgggaaagctggacctgaggctgttttcaaagctcaaagatgaggctctgttgggaagctcacatgacactacctatcacttcagcctggttctccgggaccaggaggttaaattcaaggtggagag

SEQ ID NO: 360 - DNA, 1943 bp, Rattus norvegicus
  misc_feature: Incyte ID No: 286879_Rn.1
gcttcatgagagtgtccacgaaggtacagacggcacattttaagatgaggaggcacaatattgtgctggatgaagggatgatggagtcactgatggagctcccagagcagtttaactacggcatgtactccaagttcatcaatgactatggcacccactacatcacctctggaaccatgggtggcatttacgaatatgttctggtgcttgacaaagagaaaatgagaattcatggcattactgtggaagatgtcaaaaaatgcatcggaggtggcgttggcctgcagtttggagagaaaataattggtgaaggagatttatcaggagagtcttgtgtcatgactggagatggcaaccaggacaaaaggaagaaggacttggcagtggaggacatcatttctcgggtacaaggtggaagttctcgctggagcactggcttggcacacaacagcagtgctattacataccggtcttgggggagatcattaaagtataacccttgttgtatcgattttgagatgcaacccatctatcagctactgcagcacacaaacctggggcctctggagactaaacgtcggaacctgcgcagggctttggaccagtacctgatggaatttaatgcctgccgctgtgggccctgcttcaacaatggggtacccatactcgagggcaccagctgctcgtgtcaatgtagcatgggccggcaggtgcctgccatgtgagagcatggtattggaagcgatggagggagccaaagctgatggtcgttggagctgctggagttcctggtcagagtgtagaggagggtcccgggagaggaggagacagtgcaacaatccagcaccccagaatggaggtgccccatgcctagggaagagcctgcagacccaggcctgctgagtagctctggaggcagacttggaaggaagctgtagatgctgctgcctgtcctggctgctggttaggactgattgctgctctgagtaaatgcaaacccacgaaggctgttcccttcacacactcattttttttttctagataccaacctcataatctttagcctctaccaataacctggctctaggttgcctccttgtcccagagggtcgctaccctttacatctcagaaccacctccctatcttattccattcaggatgctcaataataaactgggtgtggtttagacacatcagaaataattcctcacaattctggaggcataaactgcaagatgaaggttccagcaggtctagggtctggagaggctgtgttctattttatatatgtcctttcattgggttattacatggcagaggggtagcaagtctctaggtcctctttagtaaggacaccagtcctactcatgagaatgttgcctttatgacttcatcatctcctgaagtccagcctcctcttttgacactgggtgtaggtcttccatgtggagaacttagagagacctcaacattcagaccccagaatatcttttgttactctctctcagtaagcaatcatatttgaaggcatcatatttgaaggcagaaactgggccagttttattcagcatagcgtctttagatgcgaaggctatgcattgcagactgtaggggatctcatcagcaatggttgctggacaagcagacagatcaagagtcagttcatgggtgaggtctgtactggtcagtcttgcagagtctgtgggtggacttggaagggtcaatcagtaaagatcaacatccattctctgatcttctcaagaagagccagtcacagcagccagcctagtgttcctacatactctaaaccatgtgcatgttcagcattgacttaattggggtttctcctgccatgagacaacatcatgaggagaagcaactggggcaaaaagggttaacttcagcttgcatgccccactcgcagtctatcatgaaaagaagt

SEQ ID NO: 361 - DNA, 2337 bp, Rattus norvegicus
  misc_feature: Incyte ID No: 287495_Rn.1
  unsure 1273: a, t, c, g, or other
ggtccggagcaggctacaacagcgaagacgaatatgaggctggctgcagcacgaatcgaggccatggatcccgccactgtagaacaggaacactggtttgaaaaggccttgcgggacaagaaaggcttcatcatcaagcagatgaaggaggatggtgcctgtctattccgggctgtagctgaccaggtgtatggagaccaggacatgcatgaggttgtgcgaaagcattgcatggactatctgatgaagaatgccgattacttttccaactatgtcacagaagacttcaccacctatatcaatcggaagcggaaaaacaactgccatgggaaccacattgagatgcaggctatggcagagatgtacaaccgtcctgtggaggtgtatcagtatagcacagaacctatcaacacattccatgggatccatcaaaatgaagatgaacccatccgtgtcagctaccaccggaatatccactataattcagtggtgaatcctaacaaggccactattggtgtggggctgggcctgccatcatttaaaccagggtttgcagagcagtccctgatgaagaatgccataaagacatcagaagagtcatggattgaacagcaaatgctggaagacaagaaacgagctacagactgggaggccacaaatgaggccatagaggagcaggtggctcgagaatcttacctgcagtggctgagggatcaagagaaacaggcccgccaggtccggggacccagccagccacggaaagccagcgccacatgcagttcagccacagcagcagcctccagtggtttcgagtgctctgcactagtcggtcgccacggcaacgaagttcagcctcgtcacctgagcaccctgaactgcatgccgagctaggcattaagcccccttccccaggcactgtgttagctcttgccaaacctccttcaccctgtgcaccaggtacaagcagtcagttctcagcaggggctgatcgggccacctctcctcttgtgtccctctaccctgctctggagtgccgggccctcatccagcagatgtccccctctgcctttgcaggtctgaatgattgggatgatgatgagatcctagcatcggtgctggcagtgtcccaacaggaatacctagacagtatgaagaaaaacaaagtgcacagagacccacccccagacaagagttgatggagacccagggactggacaccatccccgatcccccactcctgccctttaatgccacccaaacttctttggctttnttccctcttggcttccttcctttgtttcctcttttccttcttttccacttccctctggctggcccacccatgcggtccatccatctcatccctgccaccaccattggtctctgccagctgatgtgccctattgcccccctgcagagcaccatctcagcattccacaggggactctggacagggtgcggaaggtaggcaagagacccacagagacagaccatctggcagccaggcagccccagaagagagacattcagacaaaggaagtcttctgctcgtccttccttaaagatcagataaacttgtcacccgaacaatgatgacaagaaaagtgggagtgggaaattttccttcctaagtccctgaagaatctgagccttcaatgttaaaattttcttgattaaaactgtgctttatctcacattaatctatcaatatgaaaaccaatgtacacatgcaacgctggaccctgtgaagatgacattctgctttggaatctgggcaggttggccatggggcatagagggcaagaaggagatgggatttctgctgtctttcaggcccccaattccttggaatgggtctaaggatatgagccagagggatagtggcaagaaaattccgggttgcaagactggctttggacagtgacaattctgaccttgcgggtatcgctttgccttccaccaccgctaatctgtttggaagcttgaagtggggtgtcttcagaaatacatggccacactacaagattatgaatttagggagtgggagcagcctcagcagatggggcacccggtagcactcgcaggtgtgacaagatccaccatctgtaatgtccttggcacaataaaaccaaatgtcagtttccctgagctactctattctgtgtgggacgggtggacgggcctccgggaagcacaggatttggcttgaccagaggtctgcttgttctccagtaggtgctgtctgtaagctggggttcatctttgatcttctgtttattaaattaacttcttgttgggtgcactcttgagactgatggcagcgaatccctagagccc

SEQ ID NO: 362 - DNA, 368 bp, Rattus norvegicus
  misc_feature: Incyte ID No: 289763_Rn.1
ggggggagagagagaatgtgtgtgtgaaatacattatttcttaaagtccatttcagtggaaggccagaggatgagtatatctgtttagcaggtaaacaatgtgaatcagtgtccacatcaggcctgtagttaggtctctgtgtccatggaagggaccccacattgaccaagtgtttaacagaacctttacatcagttttattgctatgagtttaatgttgagaggattacgtcagaccaaaggagagctttagacccaccctttattctaacgatgttcctgaagcagtgctgaagatttttttttttctggatttttctggatcttggctagtcaaggtttaggtgtcatttaactgggaccacatg

SEQ ID NO: 363 - DNA, 313 bp, Rattus norvegicus
  misc_feature: Incyte ID No: 291058_Rn.1
gcgggcgagggagcttcaagaatggcggcgtccgcggcgctgatcctaccccagagccccagcatgaagaaagcagtgccgctgataaatgcaatagacacaggaagattcccacgacttctcagccggattcttcaaaagctccacctgaaggccgagagcagtttcagtgaagaagaggaagaaaaacttcaggctgcgttctctctagagaaacaagaacttcacctggttctggagacaatatcatttgttttggaacaggcagtgtatcacaacgtgaagccagcggtcctgcagcagcaactggaga

SEQ ID NO: 364 - DNA, 1051 bp, Rattus norvegicus
  misc_feature: Incyte ID No: 291637_Rn.1
gcgtcatcccggttgctgtggagccggctcgcgtggccgtacgccttgcccgcctcctgtcatgggcagctcagagagcgccgaggcccgaagggtgtccttcgagatggatgaggaggagcgggtccgggtgctgcagggcatccggctgtccgaaagtgttgtgaaccgcatgaaggattgcagccagccttcagcaggggaacagctggctcctggtcctggtcctgagtgctccgttcctgtgcccactgtccctcaaccaaccattccagtgcttactgttccttcaccctctgtatgtgggcccgcagaaggcacctataaagcccctcagggagactttaaagtgtccagggcagagaatagtgatggccagcagtcctcagcagtgaaggaggatctcaagaagttccaacaggagcagctggcagtccaggatgagctggtcaaggtggcaagaaaggagaaagaggcaactgagaagcacttgaaggcatccctgcccaagaagaagggccaccctacgagcagcagcagtcagatcgcctaaccagggaactgaagaaccagagatggccgagctcagccgccgtgacactttctacaaggagcaggcaagaacgcatccaagagaagaatgctgagctgtataaactgtcttctcaacaattcccacgaggcggcttcaaaagcagagagcacaataaagccccgcagagtggagcctgtatgctctggcctacaggcccagatcctccgctgctaccgtgaccatctgcatgaggtacattcatatgctccgaccatggcccaaggcataccagcaactgtgtgagcaccgcccgcaaggcgctgaggagcagcatccttcctggagccttgaagaagggaccgataaatgagaccacagaccatggtccccatagtcctgcagtactctgaactgagcaacccatatgcctctgagcatggggctgccatgctcaagaaacagtatgtgctactgatggaaaacaaataaagcagatgtctttgtttgcagtcattc

SEQ ID NO: 365 - DNA, 445 bp, Rattus norvegicus
  misc_feature: Incyte ID No: 292781_Rn.1
tgatgctgctttgtcagttttagaccttgtgagttttactccaaatccagcctgaccaatcctcaagtacccctcaacccccccctaatctcagccaaagggtggccagaatgctccttaaaggtcccatccatggggatagagatgttttcccctatccccgaacccttctgcccccttgttatcctcacaaagcctttagcaacttcaggccaggctcaagtgactgagtcaccgtatgtctgtcctggggtttgctgtgggaaggcagtgttctctcactgtgcaggctctgctttccttacaagtcctctggtttggccaaagctgatgaggaggaaagggaaaccccactttggtaaaggaaaacaaagggccgtaaacaaagacagacttgtagtttcttttgtattttttttttaaataatgacactttacattaaag

SEQ ID NO: 366 - DNA, 572 bp, Rattus norvegicus
  misc_feature: Incyte ID No: 293493_Rn.1
  unsure 266, 288-289: a, t, c, g, or other
tttctactgagagtttttgtatgtttgttagcagcacagatgacaatgtcacacctgttctctgtctcgagggcactgttagcaagctgaagtagcactgacataaacgtgcaggaaaaatgataacagagcggtcacactagcctgtttaatccccattggttagacgcaaaggtcatcattttaatgaaatctcagaattaagaaaatagccttgttgacttggaaatccatgtagcatttgaaaatgttggataattaagccnacttcagggatacccaggggcnnttaaggcttttctattaactggtccatccaggtggtataccagtcgtaaccgtaattgccagagcccttccagctcttataatgaaaagcaagtcccttgcatgcctgcgtcaagttccagtcaccttgttgactgtgaactagaatcttctttctgttcttggtggacacaaacactttatacatcttattatttagaagagattcctctccacaatgtcctacctctcacagaagcttaattagtggcttttttttaaatcaataaacattaggcagatcc

SEQ ID NO: 367 - DNA, 540 bp, Rattus norvegicus
  misc_feature: Incyte ID No: 293910_Rn.4
ggtagccccaaaattcccaggtgtctccctgctttacttttgagaggacattttgcaccaagctggctgtgtcctgtcccctgagtgaggatagagctgatggaagacttgtacccagagatagcacactggtccctgggaacctggatcagtgttctcatctaacaggaaggggaccagcgccctcttggtgtgcgtcacaaaatagttgaccacagcttccagggaggggcaggaaaacgggtcttctacgtcgatgacatacttagaaccttctcgcttcaccttgtagtgtttgatcaccggcgacccattgagtatctgccgggtagtgacagacacactgtccttgccatcccctccaggtcgcagaagcaggttcccgcactccgggtagcgctccaggagcagctgcgcctctagcctgctcacctgcagaaagcaccagggcacctcggctgcccttcgtacttcctctttggccaggacttcagccatcatgtacatgtgtccgggcagcagggtcaggttagatgggac

SEQ ID NO: 368 - DNA, 876 bp, Rattus norvegicus
  misc_feature: Incyte ID No: 294000_Rn.1
gtaaagaccaaaatagaggcaagcgcatggcacagactgggctggcaagagtgggtgacagagtctctgaggcaaagtggccaggtgctactgcaacgtgtggtgaaaagacactttccaggccagctgtgtgagcatgaaacacagaaccaaccacttccagaggtgcctgggtggatctggaatccttccggagttgcattagccataagctgggttcttataccttttccatgccctgcaacccaaccagacctaccgccagccttgcctctgaagcaggagtcctggcaagagagttgggttgtgcttcctctagacctccccctggaagttactcactgctgttataagtgccccctaccctcgcctattaccctagcttttgggcccctctctactactgtgtcctgtgccctcctttcaatctttacctaggccagctctcctgctgtgttgtcccctgagctgaggtcagggctacttggcagttaatttacaaagagaaaagggatctatctggctgacagttctggatgtccccacccaagatcaaggaagtcatattgctttgggtctctggcaactagtgcctaaatggcagtggacaagggcacaacatggcagaacaaactgcttacactatgaggacaggaagaaagaaaagacgcttggaacaccaagatgcatacaatccatacaagggcatgattcacaataaacactaaaggcctttcccccagctctactgctaaaggattccatcaccctttgaataagcctttagcccaatcaggagtcataccagaggtcaaaactggctttctggcattttggtctatgttttcttgcataaaataaaatttttcctaaatc

SEQ ID NO: 369 - DNA, 543 bp, Rattus norvegicus
  misc_feature: Incyte ID No: 294194_Rn.1
ctgggtctcaactcccaagccgtatatactgaacactgttaaccctttctttagactgtgcgttcaaactgacagggtatccttatctagagtaactataatgcccgtcctcgtcccttctcgtattagaaggaagactcatctctgtgcctttgactattatgtaacctactctgacataacgggcagctcgtgagcctttcttccacatcttcctacgtggtacaaaggaactgttaaggttcagagggcaccaaattaactgacatcaccttcagatactgtagtttaaatcacataggtaaactaatctgtgaataggccaatacctgtcataataacaccggcattaacatgtgtgagactgggggaaactacccaacttgtctgagctctggcctcctcatgtgttaaatagtggtaagcagtgccttcctttgaagtctcattacaaggactctgcgaaaagaaaagccccaggactgttcataattcatgtaaatgttcaattaaaatttaaatatttctttccattactactct

SEQ ID NO: 370 - DNA, 670 bp, Rattus norvegicus
  misc_feature: Incyte ID No: 294242_Rn.1
gaatgaagttaggcctcaaattcagtgcagcagatgctccatatcccagccaggtgcctggggacttcacatcagggtagttaaacccactgtgtttctccctctctcacagctcaggggtcctgtcccactgccctgtgcttccagccgcaagcttccgctgcacaaatgcctcaccccttctgaaggatatgtaagaggtcttgggcctctgccacatacctcacccccgaatacccttgtcaagaccagggcctgtcttctccttgggcaccaaggtcacagggtaggctaggggacagctctccgctggtcagaccccatccactagtaactggatacacaactcaggaaccgggtctgccctgctaacctgttgtgggaggcacaggcaggcagaccagggaccccatcctgtgcttcgctcttgctgctacacgctcgcatttgtttgccccacttccttagtttacaccatttctgcatctccctcaagtcccagctgctgacagaggccattcctttatcccaggccttggtccaggaagagaagggacagcctcacaccccagctaaacatgccttttcatcttgtatataaaggaaaaagattggcatcattttgtaaccttttttcttatttattgaatcccatactgtattcttttct

SEQ ID NO: 371 - DNA, 698 bp, Rattus norvegicus
  misc_feature: Incyte ID No: 294498_Rn.1
acttcagtctacaatcagactgaacattttattttaaaatttatatatatgatcaattctcccacacagactgtgttttgatattccaatcgatcctggaggagcatcaagggtctagggatcaggagccgcagccactggtccaacttttttgttagtgggagctccatggccattttcttcatgccatgcatgttgaatttggattttcatccatgttatgacagagaaaagtgaggatacaagccatataaaaggcaaaaaggggatgtgtgctatcgctggtgcccgaagatatccactcttcctgagagggttcatgctgtggtttattggttcagctgacgcagaagcatcaaaaatatcaacaggtgcctgagtagcaggcagaccttcttctacgtcaggagtaaaagaagattcctcatctgaagtagcagaatcaaatatttcttcttcactggctctggctcaacataggccagacagtcagcagcattggaggatttagtcgactcaggctcaagagcagccagacagtaagcagcgttggtcgaatttgtaggctcaagctcatcagtagccatattatccatcataacatggatgaaaatccaaattcaacaagcatggcatcaagggtctagggatcaggagccgcagccactggtccgactctctacttagtgggagctcct

SEQ ID NO: 372 - DNA, 426 bp, Rattus norvegicus
  misc_feature: Incyte ID No: 294735_Rn.2
tcaagtccttggactacactgcaggacagaaggcaaagaatggcactaagctactcggatcctaggctgcctgtctcctgcttcatccatccatggccagcctgagcagcggtgcctatctccggcaacagacgtagacagtactacggctctgcagtccttggcatggggcagaaagcaagaactgatgacagtgcgatgctgatgactgaagacgaaaggatagagagacaccaaattccctcatatgcatattcatgctgttaatgactgtaagaattcatcatgtggtctatgattgaataaaatagagagccaagagccttgtcttgacctatcaacacactgcctcccgctgcggcccattatggatgcctgtcctaccccagcaatgaccttgaaataaaaatgatgattttattttcg

SEQ ID NO: 373 - DNA, 951 bp, Rattus norvegicus
  misc_feature: Incyte ID No: 295083_Rn.1
gtgtagccctggcttgccagcctggtacttattatatagcccaggttagcctccaactcatagcaacactcccgtttcagtcttctgagtgctggtatctaggcgtgaccaccacacccagctttcttcaggctgaaacctagtatgagacaagcatttctggcaggtgcttactttaaaggtctactaggaaattgaggattggtttggttttggcttattttttaggtaggctccttcctatagcccaggctggccttaaatgtatgatcttgcttcaaattttccaagtgctgggatcacatcatgccagacatttttttatttcagtatataaacattaaaaacccagattgaacaaaacatcaaaatcttaggatataacaggaaccgtattaaggtgaaagaggggagagcccttaattgaacaaatatgaagacaaatcctgtctatttaaattgtgatgtttataaaggtgtttttacatttttttcattttttttaaaatactgcatcaagatagtatttatcttggttcgtgagttttaagcactcctgtttttctccccatgaatggtggactaacgccttgtgccttgtcatcatcaccttagacttgtcccagtttccgaagcttgaatgacacaggtgaaaccttcaccatgagccccctcttcttgactgcagacacctgtgtgcactgctctccctgactgcagacacctgtgtgcactggtggcgtcctcctcccacagcatacatggggtgcctgcctaggtgggtgggggtgcagatagcccagcagggcttttcctggagaataaaccagggaattccatctccactggactgctgtgtttggacttgatctgttattagattgtactagattgtacttaacactcctgtttctaaaaactgaggacaaatgaagagactcagaaaccttg

SEQ ID NO: 374 - DNA, 1055 bp, Rattus norvegicus
  misc_feature: Incyte ID No: 295185_Rn.1
gcactggtggggcaggccgcccgtctcctacctcttcccctgctttcttggtcgctgcccggccgggccaccagactcaggactctccgtaccaccgaggtgaagctgacgctcaatgaattttgctgtctgtgccgccgtcgcctgggctcaagcgcggctccgatccctcgctgtacttgggcctgggcaagcccgacgatgcgttcctggggcccccgaaggccccttctcggccgggcagaacattctccagccctcgcttctttacccgctagtcccattcgcagttacagcaccgaggagcagccccagcaacgccagagaaccagaatgatcattctgggattttccaatcccatcaactgggtccggactcgaatttatgccttccttatctgggcctatttcgacaaagagttcagtatcgctgagttctctgaaggggcaaagcaggcttttgccttatgtatccaagttgctgtcacagtgtaaatttgatctattggaagaacttgtagccaaagaggtgctgcaggtattaaaagaaaaggttgcttcattgtctgataaccataagaatgcacttgctgcagacatagatgatattgtctacacatcaacaggcgacatctctatttactatgatgagaaaggaaggaagttcgttaacatcctgatgtgcttttggtatctgactagtgccaacatccccagtgagtctttaagtgagcccaatgtgttccaggtgaagctgggggatcagagcgtggagactaaacagctgctcagtgcgagttatgaatttcagagggaatttacacaaggagtaaagcctgactggactattgcacggattgagcactcaaagttactagaataatctttcttggaaaaaaaatcaaggcgtgaactcttaataattgctgtgaaaaactaaggaagacaagtttctggatgatttgcttttaacttaattaagtctgtggattacttttgtattatttggaaatacgtcagcatactgacctaatacaataaagcattttccccag

SEQ ID NO: 375 - DNA, 624 bp, Rattus norvegicus
  misc_feature: Incyte ID No: 295681_Rn.1
agagaacctgctgggtgtagagtgctgttcatccggacagcctaggtgagcatcatgcctcgagcctccatcttgtccagccatactgtagctgggtctcaagcacatccaacctccatgaagctggcctgtggattctatcatcggacagtctccgtggaaccactgtagggttctccctgtcccacagatgcccctgaaatagctgctgctcggaggtccctccagtctaaagctttgtgaagccccaggatggccagggcaagcagcaagtgagggtctgaggggggctgagggtaggtctggggctttctgagctcctgtctgtttagcatctgtctctttgggatagttgcctccctgggaagccagagttcttgattgagcagaagtataatagttctagagaatttgtcggcagactgacatgcatagatgtagaaccttaagcccattgtggggttcgtcatctctattccctggttcaccagatgggtaactttgacctgaggtgtttagtgttccccatggttatgaaccctcagagcagctggatcttggagctggtggcaaatcaaagctattaaaagttgatctgtgtgtcttcaaaaaaaaaaaaaaggg

SEQ ID NO: 376 - DNA, 474 bp, Rattus norvegicus
  misc_feature: Incyte ID No: 295879_Rn.1
atggggttgtcataaagatttaataaaagaacaggtacagtttgttgacttttggcaagtgtttctgatccaagtagaacacaccttcatggatggtgtgtggtataatgcttcaagtcagtctcttgtggttatactgctcattgactgataccccaccctttttgctcatagcttggcctttgccatagctactaagccatttttggactgttaagtgatagttaattatttttattactcaggatacaatcagttctctccatggtcattgtcctgcttgatttattagtgtcaagggtgacacaggctagagttgtctggaaagaaggactccagatgagaaaagcttccatcagattgcctatagacaagtcttatatagtatctcctgggttattgtggatgttggaagacctggatcacttggggtggtgcaaccttgggcaggtaggtggtgctgagttgtataag

SEQ ID NO: 377 - DNA, 753 bp, Rattus norvegicus
  misc_feature: Incyte ID No: 295943_Rn.1
gccaaaatgtttattgaagactcattctgtgccatcatatgttatagccatatatctatatcatgttatagatatgtcacatatgatataatgaagtgtcgtacagacatcggaatagactatggaacttgagcctagtgagatcagaagtcaaaatctaaagccaggatgtatgatcagaccatatgttcttagcatcgccaaattacacgctgctcttaaaatgaaacaaatggatgtcactgtgaagtaactgagatctgtctaggttttggtgtttattcagaacactttctttgactacattaggaaataagtgtttttgctgagccaactctaatttctagtttagctttttaaaaaaggatatatttaagataccccttaatatgaaagttaaattctacactatagaaattcccctaaaaggcttaaaataccttgatagggaaaaaaaaaatgccactctcatccttactatatctagatctggttgtccatgaccaccacagatgtatttctatgcaccattaactggtaactagctgtgtggaattgttcataagctgcctttggaaagatattaaaattacttaccatgctgggctgacagtctaacttctgctctgtggcaggcagggatctatttgtaatagactcatggcagaggatgttggaatatcaaaaatgtctttgaatgggttaacctttcatgaccactttatgcaaataaaattaaaccattgtctgttc

SEQ ID NO: 378 - DNA, 1294 bp, Rattus norvegicus
  misc_feature: Incyte ID No: 295990_Rn.1
tcaaacagcagtggaatggctgaaggcgtggggattggagggttctcggggccacagggcgtttcttctgagttctactcccagcctagtgccctgcctcctccacctaccttgcaaggtgctgttcctctctacaatccatctcaggtccctcagcttcccactgctagtagcctgaaccggccaaaccgcctagcccagcgccgctacccaagccaaccatgctgagagcgaccgtctgtcccagggccatgaggatgaccacctacccatcctgggctcctcttctggagcacagctttcctgttggctttctacttctcagtgtcagctcacctcgtcacgctcatgcccgtgtcgtgagcctgctgcacgggcatacctggagtttgaggacaggatatcctagacaacaacttggtccagtcttcagcttagtttgagagtgatggaaattgtctcattagacggaggaacgggggccaatgtctatggtagagtgtcatggcagcagacttgaggtagaagcttgagcacctcgggaaagcgagggccccgagaatcccgggtgaaaaccggagatgacactacccggctgtacagtaggagctcaagagcaatgtcccagaataactcagactccctccatagatccgcttaaagaccagttttatggctcttgttagtgaagtttttacattgaatttgattatcgctgcccttcagtgattccctttgtcaatgacatttcagcaattttcctcctggtcctagttttgcgcacattttctgtgtggttcagactaattatatttctctcactttcttagccggtcctattttttttcacattctgacatctggctatcaagttagattgctgtatgtcattgtattgtcatggtaactactgaacctaatgatgcagatggaggaacatcagtataataaaatagtggaaaacgtttcctaagacgtcatcctttccataagaggggagggatgggcgcttcatattgctaatacctgccttcctacctcaggcctttgcaaatcgatgttctgtgagggtcaccggggccccatggaggagaaagctgtcttggaaatttccattttttcctttcaaacctcaaatagaaatgcttcttgctgtttgtcagatttgcttaaaattgctcgtcacaaagaacattttttgtatgtgtaattgtacataaaagttttgtactttaatgtactatggttctgatgttgatagcgattaaatccagataattttatagcaaagctg

SEQ ID NO: 379 - DNA, 601 bp, Rattus norvegicus
  misc_feature: Incyte ID No: 296208_Rn.1
aaagacagggcctctttctgtggttcaggaggctgtcctggaactcacaatgggatgacccaggctcattcctgcctcagcctctgagtgctgaaattctaggtgtgtgtctccacgcacggctttctcttttgttaatgaacactggctcagtttggaggtccatattaattatgcctcacatatatccttaggaggccttcttattcttgggctccttctgtcaggaactagacggccatgacagagactgctgcacctacaacccttctggagctgcagtggttagcccagcccagaagctgtgtgtgagcaggcggccaacaggacaaacagcacagcggggggccttgtgtcttcttagagccacagaaggcaacaagttgaacagagggccttcaaaagaaaacctcagtcctaatccaggaacctgtgtgtctccatttagaaaaagggtcttcagggatgtatatgtggtcattctggatttagggtgggtcttgtagtcagggcaggtgtcctttcaagagacacatgggggaagagaaagccacatgaagacaggacacagagtccaggagatatggagcctctgaagcca

SEQ ID NO: 380 - DNA, 1758 bp, Rattus norvegicus
  misc_feature: Incyte ID No: 296797_Rn.1
agagtatgccacagacaatgagaaatgacatctactccagagacattgctggaagaaattcgaagccaaaaatcgagaacttaatagctaaaaggacaaccccacttttgagcttcctgaagaacaagcagagaatgagagaagaaaagagagaagagaggaggagacgggaaatagagaggaaaagacaaagagaagaagatagaagaaaatggaaagaagaggagaaacgaaaaagaaaagatatagaaaaactaaagaagatagaaagaattccagaaagggaaaagataagggatgaaccacaagattaagctgctcatggaaaccagaaaaaggtacgatgataataggaacttgataaaagagacataaaccaagagactggacaatagaaaatctgaatgaagacagagccagtgggcacagttatactctgcccaggcgttctgatgtcgaactgaaggatgaaaaaccaaagaggcctgatgacgagagtgtcagagactacagagatagggaccgggattatgaaagagatcaggagcgcatgatccgagaaagagagaggatgaagcggcaggaagaagagtgccggaggcagcagcagaaggagcgcatatgagaaagagaaggcttttaagcgaaaggaagaagaaatgaagagagataacgaagcagttcgagataaaggaaagaagagtgagaatacagaatcaatatgctcgttagaaaaaattgaaaaaaaagaggaagtggttaagagagatcgcataaggaacaaggatcgtccagcaatgcagctttaccaaccaggggctcgaagccgaagtcgactctgtcccgccgatgaccgcatcaagcctggagattccccagtggagaaaaagcaggaaagtggtattagccatagaaaagaaggaggagaggagtgagaagtccaaatggccataggtgtcctgacctgtccaggcagccagagtgcacctggctatgctgtccagaagtgccttcagggcagaggaacagagaacaagaaaaggggtcgctgtgctggtggggcactacagaggagtgtgtctaagcagaataagattgcaggctcagaatcaaagtgtaatttcattgttttctgcagtttccacaagttaattttaatgtctcagaaaaagatggtagcaaggatattgcaagtgaaaaatgtcaaataagggcttaactttgttatgaccagctaaaaagagcaggttcgaaactcaacaggtgtcttaatcctggcttggcgcgccttagttcgagtggagcaggagcacactaagtcttgttgggatctaacttttgcattgttggtgttgactctgtagtgtagaagcaacaagcatgtaattgtagcacaagtaggagcagaaggtagagcacttttttggctgatggaaaggatataaatagtctcgttacatcaattccctgtgtactgaagtttgcgtaaattaacagcttgttttacttctgtgaaacattagcatcaaaaatgacttgtatacatctcgtttttgcctttagcatcttttcctgttaatagataaaatgtagtccttggttagttactgataatctagtctttgttttaccttaggtctgatgatttgagtgaataccctctttcaggaagcaaactacaccaatatctgctcctgccatggcaactttcagtcttagcttgttttgtaatgctgtcaataaatttctacttcattc

SEQ ID NO: 381 - DNA, 444 bp, Rattus norvegicus
  misc_feature: Incyte ID No: 297985_Rn.1
aatataatgaattaagtgcctgtgagagactgaggatatagcttagtggctatgcttatttgactttcttctatagtgtccctgaattcattctccagtgctatatagacaacaaagaaattaaaacttccttataataactgtgcctattgacctggtgagatggctcagtgataggtggtgctttcatgcccagcctggacagcttgagtattgtctttccccacaggatcatacatggtaggatgagaacctactcatgaacaagattgtcctccaacacacgcacacacatgcacatgcacacacaaattacatgataaatattaaaaatagtgcatatccaaaaatagagttcttttgtatcatgaattaaaggggaaccttaagtataaacattcttattaagacaaaaaataaaaattggatcattatagacaaaaa

SEQ ID NO: 382 - DNA, 1059 bp, Rattus norvegicus
  misc_feature: Incyte ID No: 298078_Rn.1
caggacacctacaggctcggtccttcaatatggcttttattttgtaacccaccaactgcagacccgcggccaccccaaggtgccaatccatccccatgacccatcgggacagagggaggtggcacatgccctgtgtacttcttcagtggcaagggtggcactggcctcagacccgtaaccagctgccaggttaagagtagtgaggggaacgagagtgcccagggccacgggcaggtaggctgacccccctcgtcctatgacacgagtgccaccagggtggcagccaccactgctgaaccgaggcagcctacggtgggtggggggagccaggcctcagcaggtgctagagggatgcaagcagctggtcttcagatggcctccacagccccgcctgacacctcctgggtcatattgctattgaatcaattgaatcaattcactgtggggtccctgaggtcaaccatcagcaccggtgtccccctcccaaggctatcctgtctggggacatccagggctgtgccaggccctggttgtcccatcagacactatgacagaggactgcgactccccagaatgtatctcaggtagggaaactgaggctgggggggcagtgtagaaggtggggagacctcagaactgcacacactccagaccagggccaactcctgctcagtcaccagcactgggactgagcgaagggacgcttgcaggaggggccagaacctcaggtggctcagatccagctgggggaccaggtgggttcaatggtggcagaggtgacaacaggcgggacaggggtatgaggaggagcatcagggagacattgtcgggtgctggccagtgctggggcgaggcaggctgacggtggctgcctctggggaactgcagagacaggcttctgggacccagccactggggaggccaacagcagtgtgcggcccttcagtgcatgtggcccgggtcatcattccatcccagtgggctcgtctgcaggcgggcggggctctcctccaggggcattcaaagaaatggacagggagaggtgtccctgcatcctag

SEQ ID NO: 383 - DNA, 1308 bp, Rattus norvegicus
  misc_feature: Incyte ID No: 298727_Rn.1
aatagggactaatgtgggaagaatggctaatttgtcacagtgcttagttacaactgttaatgtgtggcctgctgtaaggtgtacatgtgggtacaggttgtctatttccaaacagagtataatatcaatactgctaaatctgcatgtcctctgtgtgactgatagagcgttgttatttcattttttaaagacaaaaatgacagcaaaatatagaattccaacatattaatgtagataatctagttgggaatacttttgtctcactttcccttttaatattcataattgactcatgtttagaacactttaatttacaagctaaattgcagatgggagcaatagatttagtttagatttaggtgggtagtaataccagtaaacttcaattacataactttgcaaccacaaaacctgtgatacctgtacagtaacaaatgttggcattatcagttgaactgtacatataaagtgcttcttccagttagtctctgtagtgattaagtttctaaaatttatctgaacaccatacagaaaacttgttttggggacatttgatagttattgatgtacatctgtaaactgatgacagacataactcatcattccccagaaactttttttggttacagtatctaacattttgcctcctcttttttggttttgctggttataaaggtttggattggagtagggctcactggtatcccgatccttgggagctggatcattggaattcaaatcataatgtggataaggatagggaggaatgaattaccaggacttcatggagccggattcagattaaccatggtaactataggtaatcggatgtcctgtcctggctccctaaccaataccgcaattcggtgtggaattttatatatatcaattccaaaccttaatatggcataattcacaaaagaaatttttttcctaatatatattagaacagaatataggagctccttaagaatggcaacagaataggaaattgtgttttgcaatatatatttggataaaaaggagacaaagacgaggaacctgagagaataataacgaatggagcaatataccttggaaggaatataagaaaagaagataagaatggtaaaccatttaaaggagaaagggggggatttagacatattaaaataagataaataaagtaagtaaattataaatataaagaaaacaaaattggagttgaagaataagtaggtttccaattggctattgccatttttcatattgaaaaaataaacattttttaaaaaacgaagtatggttgtccctttatccatcaatcaa

SEQ ID NO: 384 - DNA, 1709 bp, Rattus norvegicus
  misc_feature: Incyte ID No: 322923_Rn.2
agcttcatcactccctcacagtttgaaccacgatccacacagcccctgaaaactcacgtttcctgttgcattggagttaaagaaactgagatgaagagctgctgtcaataggatggagtaaatgtgaaattcaaggcttgtaagatcacaggaagggcaaacaaagtacaaggtcagtgcctcagattaatttgccgctgcagatgctccccacagacactcctgctggactgaagacccaccatgtctctgctgactactgtactacttctctggggtttcattctgggcccagcaactgacacagctctgtatgttcaaggaagcctcggaaaacagtcccttgcccaggccctggctttctgccaatccagtgccgcggatcacacctggcctgaggacattcctgctgtgccaggggacagtgcgggatgtagtcttcatgctgaggcgggaaggagatgatggtttcctggcgatagctccaacagatgtttttctggagggagctggacccgatggtttccagaatataacgcaggcaggaaacaaggaaaaggaacaaggcattttccaagtccatgagcctggaaactacagctgcaactattacactaatacagagtatacgccctctaagcccagtggtactgtgaccatcaaggagtatgtcatacctccaccacccatgctgacttctttagaaagttccacagtggatgaacccgagatgacccaaatgagccttctgtgtgtggctcctctgagtgatgttgaattccaactgaggcagggagaacgtgagatgaaggtccttatcgtcagcaccagcccagagcgagctagcttctatctgaaactgtcagacatgggtgaccatagccctttcacctgccgctaccgtctaaacagaatgacagcgtggtctgaagacagtaagccggtgcagcttatgtggagtgatgaaactctaccagaaccagtgctcactgtagagccctcacctcatcagagctttgagcctggttcaacggtgcagtttcgatgtaccgcgcccaaggctggcctacgctctgaggctggcctacgctttggcctgcatcttgaagacttgtatgatcacaggctgctccagacacaaaagtcttctggtaatgaaactgtcttccagctgcgaaacgtctcagccacagactctgccagctacagctgcatctatactgaactgacgccaccctactcaggatctgctcccagcgactttgtgattctgagggtgaacgggccacccccgccaccaaagctccaagctctgtggacaggtaaagtgtttgctggtcacgatgttgttctacgctgtcagagtgatgtaaccggggtcatcgtggagctgctgcgtgatggcaaatttgtgccctacaggatactccggattacggaacaactacagtgacctggggctgcattctgtaggtccccaacatacagggaactacacctgccgttatacctcctggttgcctgagcctgtccagtcagagcccagcaaccctgtggaactcctagtagaaggaaactgatgtagctgcagactcagaaccaaatgttgttcttggaaagagcagaagacagatgggcagaactcctattcttcctgctgcaaaatgtatttccctcaaactccctccacttaataaaggtcaaacaag

SEQ ID NO: 385 - DNA, 78 bp, Rattus norvegicus; identical to SEQ ID NO: 145
  misc_feature: Incyte ID No: 323001_Rn.1

SEQ ID NO: 386 - DNA, 295 bp, Rattus norvegicus
  misc_feature: Incyte ID No: 323163_Rn.1
ggaaatgcctggaacccctttaccaaaagattgccaaagccaccggaacactggtttctaccttaaaaaaaataagggggttggagggaagatatccaaggagaagataaatatcccatcagaccttcccacaaagccaagtcctcacgcatttcatgaaatgtcttttcattctcttatttctagaaaaatggctcacagcatttcaaccggcctacgagtaattcagaatgtcctagaaataggagggacgtagaagtagggtttccttccatgaaaagcatcactgccttga

SEQ ID NO: 387 - DNA, 322 bp, Rattus norvegicus
  misc_feature: Incyte ID No: 323269_Rn.1
gtggaacttggtcctggtggcgaaggtggactagagttcttgcctgggtggctaggtgctcactacgtagagggtcactgtgaaaccctgcatagccccgggctggcttcactccgttttactttctgggctgtgtagtccttatctgtgtcatagccaggccaaacacctggctagagctctgcaccgaggatgggagggtgctgggtaccttacgaatgtcttatgagccagtggcttggagggcagggtagagttcagtctgtcctcaggcacatagtggaattagcctgtgcttctgaggtcccagcctccctctcct

SEQ ID NO: 388 - DNA, 329 bp, Rattus norvegicus
  misc_feature: Incyte ID No: 323335_Rn.1
caaagttcaattcagttcccacacctatggtaacagcgcatttccgattataagtggtccttcctactttaggcttttcttgaacaaagagaagggagaaatatttttcaaaaggtcttatttcattagccccaaagagagagatttctgctataataatgtgttagggaagggaatttaagaggactttgaactagcagtccctccctttcctgacactcactggtttctcttctcctgtgttctgtctttgtttatatatgggggaccctaagggcttttccagtcccacaccctccttgcagcttccccctcctgcctggggacaa

SEQ ID NO: 389 - DNA, 333 bp, Rattus norvegicus; identical to SEQ ID NO: 156
  misc_feature: Incyte ID No: 323345_Rn.1

SEQ ID NO: 390 - DNA, 283 bp, Rattus norvegicus; identical to SEQ ID NO: 153
  misc_feature: Incyte ID No: 323356_Rn.1

SEQ ID NO: 391 - DNA, 284 bp, Rattus norvegicus; identical to SEQ ID NO: 154
  misc_feature: Incyte ID No: 323610_Rn.1

SEQ ID NO: 392 - DNA, 288 bp, Rattus norvegicus; identical to SEQ ID NO: 144
  misc_feature: Incyte ID No: 323759_Rn.1

SEQ ID NO: 393 - DNA, 286 bp, Rattus norvegicus; identical to SEQ ID NO: 150
  misc_feature: Incyte ID No: 323768_Rn.1

SEQ ID NO: 394 - DNA, 288 bp, Rattus norvegicus
  misc_feature: Incyte ID No: 323823_Rn.1
ggaacatcagctctagaaatctaggtagcagcttgcatgattaggtgggttcaagaccagccacggctacagaatgagcactgtctcaagcaggagggatatatcaggacattctcattcaggccccttctcaggaggcggaattgcctgatcctggtagttctgagccatgtagtgagactcctgtctcaaagcagaacagaaagccagctcagccctcaggcaagtactcgggagctgaggtgagacgaggaacgctgagctggagcctgcctgatcacgcggtaa

SEQ ID NO: 395 - DNA, 290 bp, Rattus norvegicus
  misc_feature: Incyte ID No: 323883_Rn.1
gaagttctaagaaaaacaccacacctacattaaatactccacaagactggatgactaatcagaactctgtggctgtggagaacagagatattgtaaattcagagtcaaaattatctctagctatctttagaactcttgcagccacacatttcttactgctgtgtctgatctaagactcttatgatatattaactgtcgggaaaactttggggactgttattaatgtaggagactctgacatcttcgaacccaaaagctatgattgtaatcagatagcactgagacctata

SEQ ID NO: 396 - DNA, 290 bp, Rattus norvegicus
  misc_feature: Incyte ID No: 323907_Rn.1
gtgttatttcacatgaccatatgctgtttgaccccctacactagaatcacagaaggtgtgagctgctatgtgatgccagagactcaaccccagcccctgagcatcgtgagtgggcatcttcccagccccagttactccttgacacatggttgtgtatcacatcaggatttcccaccaggccagcactgtctcctatgctactgtcgatctcttcctcccctgttggcccctttggtcccacagttactcttgtattttctcatcatgtatgcaaatacaaccttacattt

SEQ ID NO: 397 - DNA, 618 bp, Rattus norvegicus
  misc_feature: Incyte ID No: 324669_Rn.1
agaaaaaaggagagcagtggtgtctgaggaagtcagactccacagtagcttggggtctctgagcaaggactggaacgggacatctcatgtgacctgtacgcatgctgaatctccctcctatctctcagctacacctactccttctgtctggaaaggcacgtaggagggcaatatgatccacactaggggctagcaagtctgtgagaccgtcacaagtccctacttcctctaaagttatactccaatgtaaagacttgctaaaattggcccagttgaggacctgtaatctcgagcacctgggaggctgcggcaggatggatcatcaaatgcaaggcacttaggctccatgctcctatgcctaggggaatcttccaggagactctattgagactcggtctcaaaattccagattagggaaaagagggtgggaagctgagatagtgcagtgggtgaagggcttgctgtgcaaacctggggtcctgagttcaaatctctagtacctgtgtaaaatgctggacacagcagtgcacgcctgttacccagcatgtggggtgagggggctgacacagggaaatctctggaacttagtggccagcaagcctagaatcaaagagctgc

SEQ ID NO: 398 - DNA, 121 bp, Rattus norvegicus
  misc_feature: Incyte ID No: 326350_Rn.1
aaaaaatcaatcacagtaaaatgaactctgagcacatgctggtggtacaacagtttagccaaacacaaaatagaacacacttttaaaactgtcatatttggcaaatctttgcagaaacccc

SEQ ID NO: 399 - DNA, 614 bp, Rattus norvegicus
  misc_feature: Incyte ID No: 327057_Rn.1
gcccatgggctgtatcaaaataatgaccctactgtctccgcacaaatgtttaacatgctgaagatatcagggtaagctcaataaaatggcggctttttgcaatcagaaaacgagaaagctaggctttatacaagtcttacccaactctgtacgagtaaggccaggtcaaggtcccgactttttctttaaaggctttaatactgtggttgacttagggatcgcctagcacgtggcaggatccaaatcccacctaacacaggagcgaggttggtcgccaagggtcactgaagggtaatggtcacggccctttccagttggcgtcatcctaataaggttactgcacccaagctcgtaatcccatcaaggcacaaatctcatcacccccaaaccgataatctgcagcactcaccagtcaaaaggcgcggtcggtaggccgcggaattatcactgcgcatgcgaccattagggtccgtgcttctactgccgaaatggagaatcccggttccttagcagcaggctccgtatcccgcggccactgaggaaccatccggggatgcagaccgagtacggtgggctggagaactgggagaatggggggcggggggcaagactgg

SEQ ID NO: 400 - DNA, 7805 bp, Homo sapiens
  misc_feature: Incyte ID No: 235885.5
agggccccaggtctgtggggcatcctgtcttcctttatgtggggtaactctccgttccgttccccaagccttcacagagtgacaccttcacagataatggggtggggggcctggggtcctctggcagagacatctggggagaaagccagggacctatccctgctgaagcaggtacaggccatcctctggatttgtgggcctgagagtgtgtgtgggtgtgggtgcgcgcgtgcgcgcgcgtgcttttgagaaggcatatgctgggtgtgtctgtctgtgcctatatctttgtttgggtctcccatactgcgtatagatgaatgggtcaggatatctggaacaaaatatggaggtgaagggtgagatcgggaaacaaagggtatggccccctagttcccaaagggagcagggagatgggaatagaattgaaggtaggttttaggctacttgggaggaggaatatttaggtaattgtggagactttctcctgtgtgatgaaggcggcagacactgtgatcctgtgggcaagaagtaaaaatgaccagctgaggatttcttttcctccaggactgtgttggggtgacaggatgcctgataaggatgacattcggctgctgccgtcagcattgggtgtgaagaagagaaaacgaggacccaagaagcagaaggagaacaagccaggaaaaccccgaaaacgcaagaagcgtgacagtgaggaggaatttggttctgagcgagatgagtaccgggagaagtcagagagtgggggcagtgaatatggaaccggaccgggtcggaaacgaagaaggaagcaccgagaaaaaaaggagaagaagacaaagcggcggaaaaagggggagggagatggggggcaaaagcaagtggaacagaagtcatcagcaactctgcttctgacctggggcctggaggatgtggagcatgtgttctctgaggaggattaccacacgctcaccaactacaaagccttcagccagttcatgaggcccctaattgctaagaagaatcctaagatcccaatgtctaagatgatgaccatccttggggccaaatggagagagttcagtgccaacaaccccttcaaggggtcagcagctgctgtggcggcggcagcggcagcagcagcagcagctgtagctgagcaggtgtcagctgctgtctcgtcggccacccccatagcaccctccggaccccccgcccttccaccaccccctgctgctgatatccagcccccacccatccgaagagccaaaaccaaagagggcaaaggtccaggccataagaggcggagtaagagcccccgagtgcctgatggacgcaagaagcttcggggaaagaaaatggcaccactcaaaataaaactagggcttctgggtggcaagaggaagaaaggaggctcgtatgtttttcagagcgacgaaggtcctgaaccagaggctgaggaatcagacctggacagtggcagtgtccacagtgcctcaggccggcctgatggccctgtccgcaccaagaaactaaagagaggccggccaggaaggaagaagaagaaggtcctgggctgtcctgcagtggccggggaggaggaggttgatggctacgagacggatcaccaggattactgtgaggtgtgccagcagggtggggaaattattctgtgtgacacctgccctcgtgcctaccacctcgtctgccttgatcctgagcttgaccgggctccagagggcaaatggagctgccctcactgtgagaaggagggggtccagtgggaggccaaggaggaagaagaagaatcgaagaggagggagaggaagaaggggagaaggaggaggaggatgatcacatggagtactgccgcgtatgcaaggacggcggggagctcctgtgctgtgacgcgtgcatctcctcctaccacattcattgtctaaaccctcccctgcctgacattcccaatggtgaatggctgtgtccccgatgcacatgccccgtgctgaagggtcgagtgcagaagatcctacattggcggtggggggagccacctgtagcagtgccagcccctcaacaggcagatggaaatccagatgtcccacccccccgtcctcttcaaggcagatcagagcgagagttctttgtcaagtgggtaggactatcctactggcactgctcctgggccaaggagcttcagctggaaatcttccatttggttatgtatcgaaactaccagcggaagaatgacatggatgagcccccacccctggactatggctccggcgaggatgatgggaagagcgacaagcgtaaagtgaaagacccgcactatgctgagatggaggagaagtactatcgttttggcatcaagccagagtggatgaccgtccaccgcatcatcaaccacagtgtggataaaaaggggaattaccactatctagtaaaatggagggacttaccatatgaccagtccacgtgggaggaagatgaaatgaatatccctgaatacgaagaacataagcaaagctactggagacaccgagaactaattatgggggaagaccctgcccagccccgcaagtataagaagaagaagaaggagctacagggtgatgggcctcccagttctcccactaatgatcctaccgtgaaatatgagactcagccacggtttatcacagccactggaggcaccctgcacatgtatcagttggaagggctgaactggctacgcttctcctgggcccagggcactgacaccattctagctgatgagatggggctaggcaagaccatacaaaccatcgtcttcctctactcactctacaaggagggccacacaaaaggtcccttcctggtgagtgccccactctctaccatcattaactgggagcgggagttccagatgtgggcacccaaattctatgtggtgacatacacgggtgacaaggacagccgggccatcattcgtgagaatgaattctcctttgaggacaatgccatcaaagggggcaagaaagcttttaagatgaagagggaggcacaggtgaagttccatgttctcctgacatcgtatgagctgatcaccattgatcaggcagcacttggttccatccgctgggcctgtcttgtggtagatgaggcccatcgactcaagaacaaccagtccaagtttttcagggttctcaatggttacaagatagatcataagttgctgctgacaggaaccccattgcagaataatctggaggagctcttccatctcctgaacttcctcaccccagagagatttaacaacttggagggcttcctggaggagtttgctgacatatccaaagaggaccagatcaagaaactgcatgatttgctggggccacacatgctgcggagactcaaggcagatgtctttaagaacatgccagccaagacagagctcatcgttcgggtggagctaagccccatgcagaagaaatactacaaatacatcctgactcgaaattttgaggccttgaattcacgaggtggtgggaaccaggtgtcgctgcttaatatcatgatggatcttaagaagtgctgcaaccatccatacctttttcccgtggctgctatggagtcccccaaactccccagtggggcttatgagggtggggcacttattaagtcgtctgggaagctcatgctgctccagaagatgctgcgaaagctgaaggagcaaggacaccgagtgctcatcttctcgcagatgaccaaaatgttagacttgcttgaggacttcttagactatgaaggctacaagtatgagcgcatcgatggtggtatcacgggtgccctgaggcaggaggccatcgatcggtttaatgctcctggggcccaacaattctgcttcctcctgtccacccgagctgggggcctgggcatcaatctggccactgctgacactgtcatcatctttgattctgactggaacccccataatgacatccaggcctttagccgggctcatcggattgggccaggccaacaaagtgatgatttaccggtttgtgactcgcgcgtcagtggaagagcgaatcacacaagtggccaagagaaagatgatgctgacacacctggttgtgcggcctgggctgggctccaaggcaggctccatgtccaagcaggagcttgacgacattctcaaatttggcactgaagagctattcaaggatgaaaacgagggggagaacaaggaggaggacagcagtgtgattcattatgacaatgaggccatcgctcggctgttggaccggaaccaggatgcaactgaggacactgacgtgcagaacatgaatgagtatctcagctccttcaaggtggcacagtacgtcgtgcgggaagaagacaagattgaggaaattgagcgagagatcatcaagcaggaggagaatgtggaccctgactactgggagaagctgctgaggcatcactatgagcaacagcaggaagacctagcccggaatctaggcaagggcaagcgggttcgcaagcaagttaactacaatgatgctgctcaggaagaccaagacaaccagtcagagtactcggtgggttcagaggaggaggatgaagacttcgatgaacgtcctgaagggcgtagacagtcaaagaggcagctccggaatgagaaagataagccactgcctccactgctggcccgagtcgggggcaacattgaggtgctgggcttcaacacccgtcagcggaaggctttcctcaatgctgtgatgcgctgggggatgccaccacaggatgccttcaccacacagtggctggtgcgggacctgaggggcaagactgagaaggagtttaaggcctatgtgtctttgttcatgcgccatctgtgtgagcctggggcagacggctctgaaacctttgccgatggggtccctcgggagggactgagtcgccagcaggtgttgacccgcattggagtcatgtctctcgtcaaaaagaaggtgcaggagtttgagcacatcaatgggcgttggtcaatgccggaactgatgcctgaccccagcgccgattctaagcgctcctccagagcctcctctcctaccaaaacgtctcccaccactcctgaggcttctgctaccaacagtccctgcacctctaaacctgctactccagctccaagtgagaaaggagaaggcataaggacacctcttgagaaggaggaagctgaaaaccaggaggaaaagccagagaagaacagcagaattggggagaagatggagacagaggctgatgcccccagcccagccccatcacttggggagcggctggagccaaggaagattcctctagaggatgaggtgccaggggtgcctggagagatggagcctgaacctgggtaccgtggggacagagagaagtcagccacagagtcgacgccaggagaaaggggggaggagaagccgttggatggacaggaacacagggagaggccggagggggaaacaggggatttgggcaagagagaagatgtaaaaggtgaccgggagcttcgaccagggcctcgagatgagccacggtccaatgggcgacgagaggaaaagacagagaagccccggttcatgttcaatatcgccgatggtggcttcacagagcttcacacactgtggcagaatgaggaacgggcagctatttcctcggggaaactcaatgagatctggcacagaagacatgactattggcttctggctgggattgtcctccatggctatgcacggtggcaggacatccagaatgatgctcaatttgccattatcaacgagccatttaaaactgaagccaataaggggaactttctggagatgaaaaataagttcctggcccggaggttcaagctcctggagcaggcgctggtgattgaggagcagctgcggcgggcggcctacctgaacctgtcgcaggagccggcgcaccccgccatggccctccacgcccgcttcgccgaggccgagtgcctggccgagagccaccagcacctctccaaggagtcgctggcggggaacaagccggccaacgccgtcctgcacaaggttctgaaccagctggaggagttgctgagcgacatgaaggcggacgtgacccgcctgccagccacgctgtcccgaataccccccatcgcagcccgccttcagatgtccgagcgcagcatcctcagccggctggccagcaagggcacggagccttcaccccacaccggcctacccgccgggtccctacgctacacctccggggtacggggcggccttcagcgccgcacccgtaggggccctggccgccgcaggcgccaattacagccagatgcctgcagggtccttcatcacagccgccaccaacggccctccagtgcttgtgaagaaggagaaggaaatggtgggggcattggtgtcagacgggctggatcggaaggagccccgagccggggaggtgatctgtatagacgactgactggatcccaggcctgcccttcacccaggccccgtccccgaggccgacccccagctcaagcgctggggcctgctgccagccctccaccttccccaccccttgggccatcactgggctaggaacccctttgcccctctctgcagctcctctcttcaagaagggccctttgtctttctccactcccacacacctttcccaccaagccttgaagactgtgctggtgagaagaagtctgggtgggagatggctggcagggtcttccaagtaccttcctcccacactgccaagtatacacaacttcccagtaaatggttgtggggaggaaagaggtggagcctccccagccgtttccctgcagaatcagctctgtctcatgtggaagtggagaatcagccttgcctggcctttaggaacttttgtggggaagagagctttgaagagaggagggggactttagagagggatgaaaatgagccctgggagggaggaagggacgaggaggggtggctgcatgttaccgtcccctacctctccccacgtggagggtggagcagttatgagggaggaagtcaactgctgttcagcctcagaataaaggtgccgttcactggctcagttacctcctgtgtaccggcatcttgtgttgggaatgttcccccctccctagggaccaaggaccacccctacaaaaagagtaatggttgggtgatactccctcaagccaaagaggagctccccaacctgttctagggacccaggtaacctagaagggtgggagagaatacaatgggccagatgtggtggaagcccagctctggggctcaggttcctggaagacttctactaccctccctcctcaaggcctggatacagactaaatttgtataagtcaggcaggggacctagtcagggtcttgggagctaccttgtcgttgggaccagagcaaaatagtggagggcaggctagggaaatgtgggcacatcccccctcccaggaggggccggggagagtggcagtttgcatggcgaaccccccacttcctctttgctgctgtacactttctacaatagtatgctgataagtgaagggacaatagaagtgctgccactaaactttcagttgaggaataattgactggaattttttatttctttaaagtagttatcccaggtcaagttaagaccaagagcttaggcattaagccttaaagactgatcttctcttctccttgaagaaatgtcaatatctatagactcttttccaactattaacctcaagcgcttagctggaggaagaggaataaaat

SEQ ID NO: 401 - DNA, 8167 bp, Homo sapiens
  misc_feature: Incyte ID No: 348148.41
  unsure 7191: a, t, c, g, or other
ttttgatgccagccactgttggcatttatcagagtttatttaatcttctcatcaactactattgttaccctcagttgccaagtgaagggagcatgcgggaaggttaagtgacttgcccaagcccacacaaccggtaggagccccaattccaggccctagttccaaggctacattcttccaggcggcctccaactgggttggttaagggttgaaaggacagtgggacaataactgaggcccgtattgcccagagcgtccccatcccccgtccggagctggaagaggccatagaccgctgcctccacatcttttcctctcttcgggttcggtgactcacgacccttcttcctctctcccgggatatgacctcaaatttcaccccttatccagtagcgtctgggtccctggactaaagccgtcaaatgtaaccaattgctgaggagctctcccctaagaatcccgcctccactctgaggaacagcttcgctgatcaatggatcccctcctagacgcaatgagcgcgcggggcaagtggagaagcggctgaactgcccaatgaacaagcggtttccgtggttaggggcgtggcagaagcggtcgtcaggggcgtggcggcagttacttgggcggggccggtagcggcgggagctgcactggccaggggttccggctgtatatccatgagcgccgctggcagccggggagctgcaggaaccagactgggggcgagctgagcacctgtagtcaatcacacgcagcttttaggtttgtttgaataagagatctgacctgaccggcccaactgtacaactcttcaaggaaaattcgtatttgcagtgggaagaataagtaacattgatcaagatgaatgccatgctggagactcccgaactcccagccgtgtttgatggagtgaagctggctgcagtggctgctgtgctgtacgtgatcgtccggtgtttgaacctgaagagccccacagccccacctgacctctacttccaggactcggggctctcacgctttctgctcaagtcctgtcctcttctgaccaaagaatacattccaccgttgatctgggggggaaaaagtggacacatccagacagccttgtatgggaagatgggaagggtgaggtcgccacatccttatgggcaccggaagttcatcactatgtctgatggagccacttctacattcgacctcttcgagcccttggctgagcactgtgttggagatgatatcaccatggtcatctgccctggaattgccaatcacagcgagaagcaatacatccgcactttcgttgactacgcccagaaaaatggctatcggtgcgccgtgctgaaccacctgggtgccctgcccaacattgaattgacctcgccacgcatgttcacctatggctgcacgtgggaatttggagccatggtgaactacatcaagaagacatatcccctgacccagctggtcgtcgtgggcttcagcctgggtggtaacattgtgtgcaaatacttgggggagactcaggcaaaccaagagaaggtcctgtgctgcgtcagcgtgtgccaggggtacagtgcactgagggcccaggaaaccttcatgcaatgggatcagtgccggcggttctacaacttcctcatggctgacaacatgaagaagatcatcctctcgcacaggcaagctctttttggagaccatgttaagaaaccccagagcctggaagacacggacttgagccggctctacacagcaacatccctgatgcagattgatgacaatgtgatgaggaagtttcacggctataactccctgaaggaatactatgaggaagaaagttgcatgcggtacctgcacaggatttatgttcctctcatgctggttaatgcagctgacgatccgttggtgcatgaaagtcttctaaccattccaaaatctctttcagagaaacgagagaacgtcatgtttgtgctgcctctgcatgggggccacttgggcttctttgagggctctgtgctgttccccgagcccctgacatggatggataagctggtggtggagtacgccaacgccatttgccaatgggagcgtaacaagttgcagtgctctgacacggagcaggtggaggccgacctggagtgaggcctccggactctggcacgctccagcagccctcctctggaagctgcgtcccctcaccccctgtttcaggtctcccatctccctcagtgacctggatctgacctcacaccatcagcagggggcacccaccatgcacacctgtctcggagtaggcagctcttcctgggagctccaggctatttttgtgcttagttactggttttctccattgcattgttaggcatggtgacaagtgacagagttcttgccctctgtccagtttcagcatctggttgcttttaagccaagtacatctagtttccctattaaaaatgtgtctgaatagcgattttgctttgccaccaaaaggcttttccctgagaacagtgaaggatgtatgtcattttgtggtggttgtatgtgtccttacatagaccttaaaaagagctcacccttccaggccaatgctgaagacacagctccgcttggggagcctgagaacccaggcttcccaggccagagtgtggcttcttaaacggcaaaggaaattcctttgagtcacaagccaagttttcgccctgtctcctgagaccatttccctacgctttgctgctgctgagagttacctgaggcacttgttaaaaattcagcctcccaggtccctcccctcggagaggctgattcactgggtctgggaaggagcctggggattttaatttttcacaagtgccccagatgattctcatcaccaagcaaattttggaaatgctgttcaacagcgcccttaaattggaaacatctttgcagctcgttttattgaaattcataatcaggggtgtcctctagctcccacggtctccagagcagcaaggccggctatggagctgccgtcgtgtgaccacagtgtgatgtctcagaagggctctgggtgggctgagcatctgggctgtgccctggctctgcttttcaccctggacaaagtcgctgtggacttcaatttcttcacctctaaaatgggggacttggaccaggtagattgctgagctcactaccaggttcaaagttcaatgacaaactcagtttactgaggtttgagagaacatccctccaggggagcctgggagctgctctcccagtctaagcatgtagatatcatcgtttgccttttgtgtgtgtgtgtcccttatttgataaaaagatgttttgagttgttttttttttaagcactcacttgtaattttagtttttaaacccaagtccctctaactttgcctttgataccaaacaattcaaaagttggatctgagtttggagaaagatatttccaacctaagtgggtattattttgaaaccagatttttaatttaatagcctatatttgtagtctgttggataggtgtttccaaagtgtgtcttctcaagtgaaaacgcaactctaggtttcaagtactccttttctccgatcctgtggtacttgaatatccaaaaaccctgcactttgaacaatcagctgttgctatctggaactaaacagaactatgagtaaaattgcctggatactttaaaaagatatttttcctccttcatctcctttgactccaggacagactggaatataagtagtgggtctgcatggatgtttcagggatcaaaggagccacctgggcgcctgagtgccaaccctcagggccacaggtgggtgtggtttgggcacgggtccaagtgactgtgacgggacccgtgggcatgggtccaggtctgtaacctgaagaagttgttttctgacaatcaccaaatcatccgaatgacatcaaaagcagcccttatctcagagactgagatttctgtggtctcaacttcgctttggtataatttctggcactcaccagcctctatcattatgactttccccccagtgtattatttctctaataggtttccttttcacgttcttttagcacagactggcactttaccctctcaatttggaagttagcccctctcctctgttacttttcccttcacccaactacagctgtgatctagaacattcatagtcatatttctgctactactaccttcatttatcaagactttttatgagaataggtaaaccaagcaataacttcctaggactgaatcaccaccccagaagagcgagaggctcctttcatatgcctgaggccacaccccttaacctgttctgacaaaatagtggctggcccatgtaccagctccattcagaaattcaggaagagaaaagacagccctgttgtcacacaaaccggtgtgggggagggtggagcctggtctgcacggcagtcctggtggcccctgtggaggacaggcagggctggcagcatagcctttgttgccacacaaccggaatttgctcccccaggactgtgggagccagtgtcccagctgaaatctttttagtgtgtggctctgaatggcactcacattccattttggctcacatgaaactaactgaagccctttgttcaagcttcaggctcttaggcatggaaatgagaatgtgactgtggctgtcttacaggaaaattcttgtttgtccctgaatgagagcacagaggcattgaattcacagagctgcaaacttgcctgataaatgagggagtggcagtttatagataggtcatcttttttccttcctccaggtgtccttgcctttcttcccaaagtcattcatttctgatgagtatatgaatccccctcttgctagtaaggttctatttgggctaaaacaaggctgaatttttaaagagtatttgaatatattttagaatcaaattgaggctataaattgcatcaatctggacaattccattgcaggaataatatgttaaaaaccaatggggagaagcacccacatctctcctgtagcactccgtgtctcataagcaatttgaagacacttacaagtaactgattccagtcaaattaggattaactgactcaaaaaatggtgtcaagtttctttaatgtttttatgttagaagtgagtttaacagacttgaagaaaactgttatcttttcctgctgtgagtttacacaaatgattccagagcagaatgaaagcagaaagctgttggttacaatattcttttaacctctctgcagcattttacacttactgggaaccttatgattcaccgtaagagtggaaatatacctgagttcgtgtcctaatggtctctaattcacattggatcgtgggcaaatcacctcacctctctgagcctgttccctcctcttagaccatctctaagaccacttcatctatttacacatcatttgcttgaacattgctgaacatctgcgtgaacttggcctctccagcccttgcaggtggaaacagctgtgtcaaggctcaaggctcacgctgaggggacttggagggagggggcttctgcattaagctttcctggtgaagacccttgatcttgtccaaagccctgtgtctttgactggcttctcttcagagtccccgttgtcatcgtaagacccttgctgtttggagggtggtcttgtgactgtggcagctgctggccgctggaatgaggagcctatctccatcctccagtgtgactcaggcagagcattgagaattcccagggcagaaatccttcctgctcaggctttcattctaaaactacagtcttcattaaagctgaactttctgggtagctgagcttatatgcccggcatctgaatgagagctctctttgtaactgtgtgacttgagatctagtttgccagctcctgggaaacaatacatgtgttcttgtttgtgtttgctcagcaagcagatgtctgagatgtaagaagcttttcttttcctgtggcattgattctgacttagagctgaagtaaagatcactgaaacatcacgtcaagttgaagtcactcataggtctttgtcctttaggcaggacaggagagtcattaagaagcatttcactgtagcattctatcacaatatcatctggaattgttttctttgcccagaaagccttaacttgcctctagagaatccctggtattacaacgatattgcggcattagaattccaactcttctgctgtggaagtttgaagcgaagctgcagcaaaaccagagaatttcctcaagtggcctgtaggctccttgttatcttatgcccccacccctccctcaacaatatgagtgatccagaactggcccaaacacctcagctctggtccctttttgcccttcttggccttactctgttgttcaaagccactttggattgcttggatgcttcgaacagccatgaaaagtagcctgcctgtggcatttagaggccaagcaattgacagaaagggtttcttctacctctgttatctaagcagagggaagtaaacttctcaccgccccccacccctcactgcccccgattacactagaattgctttcgccaaattgtagttgaagctaaggaaggggaatctggcccctgctgggagagggaactggaatgccacacaaggcaaggcctgcttccttccttcccctctgctgctgctgcctcggaacgctgcagcccaggcttcctcccacagtggcccttggaagcaggccgcagagtagacagctgctccttttggaagagtcagtcccctgtgttttctgaactgtttttcctagcatgtatgtgggtagagctttcatgcatctctagtaataataagctgaaattagttttttttttaattctccaatttaaaacttttaattaaaaagtaaattttaatgtcgaaaatgcaaacttggggagggcagaaagatcacacacaaggctgtcacttcacacttggaggattgcacagcagccgggcaaaggctctcctcacttcccagatgggggcgggcggggcagcagagacgcacctcactccttagacagtgcggcagccaggcagagggggctcctcatatcccagacgatgggcggcccaggcagagacgctcctcacttccccagatggggcggctcccgggaagcggggctccctcacttcnccagacagggtggccaggcagaggtgctcctcacttcccagaacaattctttatgaatttgataaaggactgaagtgcaactgaaagctgctagtgatgatctggtaatatacaatttgtccagtagccagtttgtttttattgtgttttctaaccataagagatcattaaaggcaaagcctgtatgacgctgtacacacacaaaaaaatggtcaccgcaggccatactaccaatgaaatggtaggtaaacaaatcttctggtcaagagaaaaaaaaaagaaatagcactctgcatgctttgctctacaagatgaatttccctagaaagaatccatgaaatggctgcaattacaacaagaagtgaaggaagaggactgacattatctctgaaggatgcagttgaggttgatccaggtttatccgaatgtgctacctttctgagccttaaaccttcatctctcaggtgccgattttcttctgatagcttcatcatttctcccttcgtctgtccttcctccgtgtgtttgtctatcctcctctgtccctcctctttcctctccttgctttctttggttttctgcaatgatgagctgagcagcggtgagcccagcaccccggctcagactccgctggcagcacccatcatccccacgccggtcctcacctctcctggagcagtccccccgcttccttccccatccaaggaggaggagggactaagggctcaggtgcgggacctggaggagaaactagagaccctgagactgaaacgggcagaagacaaagcaaagctaaaagagctggagaaacacaaaatccagctggagcaggtgcaggaatggaagagcaaaatgcaggagcagcaggccgacctgcagcggcgcctcaaggaggcgagaaaggaagccaaggaggcgctggaggcaaggaacgctatatggaggagatggctgatactgctgatgccattgagat

SEQ ID NO: 402 - DNA, 1246 bp, Homo sapiens
  misc_feature: Incyte ID No: 1383009.65
ctacaatttacatgtgtgatgtaaattgtgtacaaaaccattaaatcattcaaaataataaactatttttattagcagaatgtatacttttagaaagctgtctccttatttaaataaaatagtgtttgtctgtagttcagtgttggggcaatcttgggggggattcttctctaatctttcagaaactttgtctgtcgaacactctttaatggaccagatcaggatttgagcggaagaacgaatgtaactttaagaggcatttcatccttcatgaagccattcaggattttgaattgcatatgagtgcttggctcttccttctgttctaacttcacagagaatgcagttgtcttgacttcaggtctgtctgttctgttggcaagtaaatgcagtactgttctgatcccgctgctattagaatgcattgtgaaacgactggagtatgattaaaagttgtgttccccaatgcttggagtagtgattgttggaggaaaaaatccagctgagtgataaaggctgagtgttgaggaaatttctgcagttttaagcagtcgtatttgtgattgaagctgagtacattttgctggtgtatttttaggtaaaatgctttttgttcatttctggtggtgggaggggactgaagcctttagtcttttccagatgcaaccttaaaatcagtggacaagaaacattccaaacaagcacagtcttcaagaaattaaactggcaagtggaaatgtttaaacagttcagtgatctttagtgcattgtttatgtgtgggtttctctctcccctcccttggtcttaattcttacatgcaggaacactcagcagacacacgtatgcgaagggccagagaagccagacccagtaagaaaaaatagcctatttactttaaataaaccaaacattccattttaaatgtggggattgggaaccactagttctttcagatggtattcttcagactatagaaggagcttccagttgaattcaccagtggacaaaatgaggaaaacaggtgaacaagctttttctgtatttacatacaaagtcagatcagttatgggacaatagtattgaatagatttcagctttatgctggagtaactggcatgtgagcaaactgtgttggcgtgggggtggaggggtgaggtgggcttttgttgatgagggaggggaaactttttttttttctatagacttttttcagataacatcttctgagtcataaccagcctgggt

SEQ ID NO: 403 - DNA, 4638 bp, Homo sapiens
  misc_feature: Incyte ID No: 411384.2
  unsure 4469, 4617: a, t, c, g, or other
cgaggcgcaaggcgctcgtttggcgcgcgcgccctaggcggcggatctaagctaacttcttggatcttttcttgtttctcctggtttttgactttttctggaccctggtgtctacgatttccgagatgccgtcttctttgttgggcgcggcgatgccggcctctacatctgccgcagccctgcaggaagctctggaaaatgctggacggctcatcgaccgtcagttgcaagaggaccgcatgtacccggacctttccgagctgcttatggtgtctgccccaaataatcccaccgtttctggcatgtcagatatggattatcctttacaaggacctggtttgctgtccgtacccaaccttccagagatcagttccatccgaagagttcctctcccacctgaacttgttgagcagtttggacatatgcagtgtaattgcatgatgggtgtgttccctcctatcagcagagcttggctcacaattgacagtgatatattcatgtggaactatgaggatggaggagaccttgcctattttgatggacttagtgagactattcttgctgtggggcttgtgaagccaaaagcaggcatctttcaacctcatgtgcgacacctcctggttttggcgacccctgtagacatagtaattcttggactcagctatgctaatttgcaaacaggttctggagttcttaatgatagtttgtctggtggaatgcagttgcttccagatcctttatattctcttcctactgataatacttaccttttaacaataacttccactgataatggcagaattttcttggctggaaaggatggctgtttatatgaagtagcctaccaggctgaagcagggtggtttagccaaagatgtaggaaaataaaccactcaaagagctcactttctttccttgttccttccttgctacaattcacgttctcagaagatgatcctattcttcaaattgcaattgataattctagaaatattttatatacacgatctgagaaaggagtaatacaggtgtatgatttgggacaagatggacaaggaatgagcagagttgcctctgtgtcacagaatgccattgtctctgctgctggtaacattgctaggaccatcgatcgttctgtttttaaaccaattgtccaaatagcagtgattgaaaattctgaatcactggactgtcagttattggctgtcacacatgcaggtgttaggttatattttagcacttgtccattcagacagccattagcacggcctaatacactgacgctggttcatgtccgcttacctcctggattctcagcatcttcaaccgtggaaaagccttcaaaagtacatagagctctttatagtaaaggtattctattgatggcagcctcagaaaatgaggataatgatattttatggtgtgtcaaccatgatacttttcctttccaaaagccaatgatggaaacccagatgacagctggtgttgatggtcattcctgggctctttctgcgatagatgaattgaaagtagataaaataattacacctttaaacaaggatcatattccaataactgattcaccagttgttgtacagcagcacatgttacctccgaagaaatttgttctcctctcagcacaggggagccttatgtttcataaacttagacctgtagatcaactgaggcatctacttgtgagtaatgtgggaggagatggagaagagattgaaagattctttaaattacatcaggaagaccaggcttgtgcaacttgccttattcttgcttgctccactgctgcctgtgatagagaagtatctgcctgggctactcgggctttctttaggtatggtggtgaagcacagatgagatttccaaccactcttccgcctccaagtaatgttggtcccatcttggggtctcctgtctattctagttctcctgttcctagtggtagtccctatccaaatccatcctttttgggaacaccgtctcatggtatacagcctcctgccatgtcaactccagtgtgtgctctgggaaacccagcaactcaggccacaaatatgagttgtgtgactggaccagagattgtgtactctggaaaacacaatggtatttgcatttacttttctcggatcatgggaaacatttgggatgcaagcttagttgtggagagaatattcaagagtggcaacagagagatcactgcaattgaaagtagtgttccctgccaactgctagagtcagtgctacaagaactaaagggtttgcaggaatttctagacagaaactcccagtttgcaggaggaccattaggaaatccaaatactactgctaaagtgcagcagaggctgataggattcatgcgtcctgaaaacggaaatccccagcaaatgcaacaggaactgcagaggaagtttcatgaggctcaactaagtgaaaagatttcacttcaggcaattcagcagttggttcgaaaatcatatcaggctctggctttatggaaacttctttgtgaacatcaattcactatcattgtggcagaacttcagaaggaacttcaagagcagctgaagatcaccacctttaaagatcttgtaatcagggacaaagaactcacaggggcattaattgcttctcttatcaactgctacatcagagataatgccgctgttgatggcattagtttacatttacaggatatctgcccacttctatatagcactgatgatgcaatttgttctaaggcaaatgagcttctccagcgttcccgacaagttcaaaataagactgaaaaagaaagaatgttaagggaatcattaaaggaatatcaaaaaattagcaatcaagtggacctttccaatgtttgtgctcagtatagacaagtgagattttatgagggtgtggtggaactttctcttacggctgcagagaaaaaagatcctcaaggtcttgggcttcatttctataaacatggagaaccagaagaagacatagttggacttcaggccttccaagaaagattaaacagttacaaatgcattacagacacacttcaagaactggtaaatcaaagtaaggccgctcctcagtctcccagtgtacccaaaaaacctggtcctccagtgttgtcatctgatccaaatatgctgagtaatgaagaagcaggacatcattttgaacaaatgcttaaattgtcacagcgatccaaggatgagctctttagtattgccctttataattggctaatacaagtcgaccttgcagataagctgctacaggttgcttctccatttctggagccacatctagtccgaatggccaaagttgatcaaaacagagttcgttatatggatttactctggcggtattacgagaagaacagaagtttcagtaatgctgctcgtgtactgtccagactggctgacatgcatagcacagaaatttcacttcagcagcgactagagtacattgctcgagccattcttagtgccaaaagttccactgccatttcatcaatagctgccgatggtgaatttcttcatgaattagaagaaaaaatggaggttgctaggatccaacttcagatacaggagacactacaaaggcagtattcccatcattcttctgtacaggatgcagtttctcagctggattctgagctgatggacataactaagctttatggggaatttgctgacccatttaaacttgcagagtgcaaacttgcaataattcattgtgccggttattcagaccctatattggtgcagacactttggcaagatatcatagagaaagaattgagtgacagtgtgacattgagctcctcggatagaatgcatgctcttagtctcaagattgttctccttggcaaaatttatgctggcacaccacgcttctttcctttagattttattgtacagtttttagaacagcaggtttgtactttgaactgggatgtgggcttcgtaatacagacaatgaatgaaattggagtaccattacctagactactagaagtttatgatcagttgttcaaatcacgggatccattctggaacagaatgaagaagccactgcaccttttggattgtatacatgtattattgataagatatgttgagaatcccagccaagttttaaattgtgaaaggagaagatttacaaatctctgcctggatgctgtttgtggttaccttgttgagctccagtctatgagctcgtcagtagcagtacaagccatcactgggaattttaaatctcttcaagctaaattagaacggcttcattaattactgtgatatactttcatccgttttatgatctgtaaaataaaaactcagctgggtccagatatcaggtgttctaaatctaagaatgtaagaacaatcttaatagaaatatgtttttaataagtggctaatatctacaaatagtacctttgctaaatgaattctttnttatgactattttgttttttagtaattgggtgaaaaaacaactgaaatgagattatttattattttaacataaggattaaaaaaatttagaaactcttattttgaattgtactgcaggcagaaatttcgaatttatattattcatttncaagttagtccaaggattggc

SEQ ID NO: 404 - DNA, 5092 bp, Homo sapiens
  misc_feature: Incyte ID No: 369213.28
  unsure 4113: a, t, c, g, or other
aatcgttggaaaaatgcgtttgaaaaacttctgtgctgtgatccggtattgcctgggaatgctatatgcctgtttacatagcttagttcccttcttgttctgccttcacagcacccgttgtccgcaatgcctgttttgcctggagtcagcctggaagacagcacaagaaggggaccatggcagccatgtatataccaaagcactgctggcctatgcttttgccctggcaggtaaccaggacaagaggaaggaagtactcaagtcacttaatgaggaagctgtgaagaaagacaactctgtccattgggagcgcccacagaaacccaaggcaccagtggggcatttttacgaaccccaggctccctctgctgaggtggagatgacatcctatgtgctccacactgagaccactgagaagggctgtgtccttctgagctacctgaatgagacagtgactgtaagtgcttccttggagtctgtcaggggaaacaggagcctcttcactgacctggaggcggagaatgacgtactccactgtgtcgccttcgctgtcccaaagtcttcatccaatgaggaggtaatgttcctcactgtccaagtgaaaggaccaacccaagaatttaagaagcggaccacagtgatggttaagaacgaggacagtctggtctttgtccagacagacaaatcaatctacaaaccagggcagacagtgaaatttcgtgttgtctccatggatgaaaactttcaccccctgaatgagttgattccactagtatacattcaggatcccaaaggaaatcgcatcgcacaatggcagagtttccagttagagggtggcctcaagcaattttcttttcccctctcatcagagcccttccagggctcctacaaggtggtggtacagaagaaatcaggtggaaggacagagcaccctttcaccgtggaggaatttgttcttcccaagtttgaagtacaagtaacagtgccaaagataatcaccatcttggaagaagagatgaatgtatcagtgtgtggcctatacacatatgggaagcctgtccctggacatgtgactgtgagcatttgcagaaagtatagtgacgcttccgactgccacggtgaagattcacaggctttctgtgagaaattcagtggacagctaaacagccatggctgcttctatcagcaagtaaaaaccaaggtcttccagctgaagaggaaggagtatgaaatgaaacttcacactgaggcccagatccaagaagaaggaacagtggtggaattgactggaaggcagtccagtgaaatcacaagaaccataaccaaactctcatttgtgaaagtggactcacactttcgacagggaattcccttctttgggcaggtgcgcctagtagatgggaaaggcgtccctataccaaataaagtcatattcatcagaggaaatgaagcaaactattactccaatgctaccacggatgagcatggccttgtacagttctctatcaacaccaccaatgttatgggtacctctcttactgttagggtcaattacaaggatcgtagtccctgttacggctaccagtgggtgtcagaagaacacgaagaggcacatcacactgcttatcttgtgttctccccaagcaagagctttgtccaccttgagcccatgtctcatgaactaccctgtggccatactcagacagtccaggcacattatattctgaatggaggcaccctgctggggctgaagaagctctccttctattatctgataatggcaaagggaggcattgtccgaactgggactcatggactgcttgtgaagcaggaagacatgaagggccatttttccatctcaatccctgtgaagtcagacattgctcctgtcgctcggttgctcatctatgctgttttacctaccggggacgtgattggggattctgcaaaatatgatgttgaaaattgtctggccaacaaggtggatttgagcttcagcccatcacaaagtctcccagcctcacacgcccacctgcgagtcacagcggctcctcagtccgtctgcgccctccgtgctgtggaccaaagcgtgctgctcatgaagcctgatgctgagctctcggcgtcctcggtttacaacctgctaccagaaaaggacctcactggcttccctgggcctttgaatgaccaggacgatgaagactgcatcaatcgtcataatgtctatattaatggaatcacatatactccagtatcaagtacaaatgaaaaggatatgtacagcttcctagaggacatgggcttaaaggcattcaccaactcaaagattcgtaaacccaaaatgtgtccacagcttcaacagtatgaaatgcatggacctgaaggtctacgtgtaggtttttatgagtcagatgtaatgggaagaggccatgcacgcctggtgcatgttgaagagcctcacacggagaccgtacgaaagtacttccctgagacatggatctgggatttggtggtggtaaactcagcaggtgtggctgaggtaggagtaacagtccctgacaccatcaccgagtggaaggcaggggccttctgcctgtctgaagatgctggacttggtatctcttccactgcctctctccgagccttccagcccttctttgtggagctcacaatgccttactctgtgattcgtggagaggccttcacactcaaggccacggtcctaaactaccttcccaaatgcatccgggtcagtgtgcagctggaagcctctcccgccttcctagctgtcccagtggagaaggaacaagcgcctcactgcatctgtgcaaacgggcggcaaactgtgtcctgggcagtaaccccaaagtcattaggaaatgtgaatttcactgtgagcgcagaggcactagagtctcaagagctgtgtgggactgaggtgccttcagttcctgaacacggaaggaaagacacagtcatcaagcctctgttggttgaacctgaaggactagagaaggaaacaacattcaactccctactttgtccatcaggtggtgaggtttctgaagaattatccctgaaactgccaccaaatgtggtagaagaatctgcccgagcttctgtctcagttttgggagacatattaggctctgccatgcaaaacacacaaaatcttctccagatgccctatggctgtggagagcagaatatggtcctctttgctcctaacatctatgtactggattatctaaatgaaacacagcagcttactccagagatcaagtccaaggccattggctatctcaacactggttaccagagacagttgaactacaaacactatgatggctcctacagcacctttggggagcgatatggcaggaaccagggcaacacctggctcacagcctttgttctgaagacttttgcccaagctcgagcctacatcttcatcgatgaagcacacattacccaagccctcatatggctctcccagaggcagaaggacaatggctgtttcaggagctctgggtcactgctcaacaatgccataaagggaggagtagaagatgaagtgaccctctccgcctatatcaccatcgcccttctggagattcctctcacagtcactcaccctgttgtccgcaatgccctgttttgcctggagtcagcctggaagacagcacaagaaggggaccatggcagccatgtatataccaaagcactgctggcctatgcttttgccctggcaggtaaccaggacaagaggaaggaagtactcaagtcacttaatgaggaagctgtgaagaaagacaactctgtccattgggagcgccctcagaaacccaaggcaccagtggggcatttttacgaaccccaggctccctctgctgaggtggagatgacatcctatgtgctcctcgcttatctcacggcccagccagccccaacctcggaggacctgacctctgcaaccaacatcgtgaagtggatcacgaagcagcagaatgcccagggcggtttctcctccacccaggacacagtggtggctctccatgctctgtccaaatatggagcagccacatttaccaggactgggaaggctggatagtnacctgtacagccttcccagtcctgggaaggctgcacaggtgactatccagtcttcagggacattttccagcaaattccaagtggacaacaacaaccgcctgttactgcagcaggtctcattgccagagctgcctggggaatacagcatgaaagtgacaggagaaggatgtgtctacctccagacatccttgaaatacaatattctcccagaaaaggaagagttcccctttgctttaggagtgcagactctgcctcaaacttgtgatgaacccaaagcccacaccagcttccaaatctccctaagtgtcagttacacagggagccgctctgcctccctgtgtaactgacacttagggagccgctctgcctccaacatggcgatcgttgatgtgaagatggtctctggcttcattcccctgaagccaacagtgaaaatgcttgaaagatctaaccatgtgagccggacagaagtcagcagcaaccatgtcttgatttaccttgataaggtgtcaaatcagacactgagcttgttcttcacggttctgcaagatgtcccagtaagagatctgaaaccagccatagtgaaagtctatgattactacgagacggatgagtttgcaattgctgagtacaatgctccttgcagcaaagatcttggaaatgcttgaagaccacaaggctgaaaagtgctttgctggagtcctgttctcagagctccacagaagacacgtgtttttgtatctttaaagacttgatgaataaacactggtgattaaggaagtccaggagttttacaaggacacctacaacaagctgaaaaccaaggatgagccccagcgggaaacgctgaaagccatccactatgcgttgaactgctgtggtttggctgggggcgtggaacggtttatctcagacatctgtcccaagaaggacgtactcgaaaacttcaccgtgaagtcctgtgctgatgccatcaaag

SEQ ID NO: 405 - DNA, 4615 bp, Homo sapiens
  misc_feature: Incyte ID No: 369213.39
ggacacaaccctgagatttatccctcacaatgcggaaagacagacttcttcatttatgtcttgtgctacttcttatcctgctttctgccagtgactcaaactctacagaaccgcagtatatggtgctggtcccctccctgctccacactgaggcccctaagaagggctgtgtccttctgagccacctgaatgagacagtgactgtaagtgcttccttggagtctggcagggaaaacaggagcctcttcactgacctggtggcggagaaggacttattccactgtgtctccttcactctcccaaggatctcagcctcttcagaggtggcattccttagcatccagataaaggggcctacgcaagatttcaggaagaggaacacagttctggtactgaacacccaaagtctggtctttgtccagacagacaaacccatgtataaaccaggacagacagtaagattccgtgttgtctccgtggatgaaaattttcgccctcgaaatgaactgattccactgatataccttgagaacccaagaagaaatcgaattgcacaatggcagagtctcaagctagaagctggcatcaatcagttgtcctttcccctctcatcagagcccattcagggctcctacagggtggtggtacagacagaatcaggtggaaggatacagcaccccttcaccgtggaggaatttgtgcttcccaagtttgaggtcaaagttcaggtgccaaagataatcagtatcatggatgaaaaagtgaacataacagtctgtggagaatacacttatgggaagcctgtcccaggacttgcaactgtgagcctgtgtagaaaattatctcgtgttcttaattgtgacaagcaggaggtctgtgaggaattcagtcaacagcttaacagcaatggctgcatcacccaacaagtacacaccaaaatgctccagattacaaatacgggctttgaaatgaagcttagagtggaagccaggatcagagaagaggggacagacctggaagtcactgcaaacaggatcagtgaaatcacaaacattgtatccaaactcaaattcgtgaaagtggattcacactttagacaaggaatccccttttttgcacaggtgcttctggtggatggaaaaggtgtgcccatccccaataaactcttcttcatctctgtgaatgacgccaattattactccaatgcaaccaccaatgagcagggtcttgcacagttttcaatcaatactaccagtatctcggttaataaactttttgtccgggttttcactgtgcatcccaacttgtgttttcactattcatgggtagcagaagaccaccagggcgctcagcacactgcaaatcgtgttttctccttaagtggaagttacattcacctggagcctgtggctggtaccctgccctgtggccacacggagactatcacggcacactatacactgaatagacaggccatgggagagttatcggagctcagtttccattacctgatcatggctaagggagtcatcgtcagatctggaacccacactctgcctgtggagtcaggagacatgaaaggcagttttgccttatccttccctgtggagtcagacgttgcccccattgcacgaatgttcatctttgccattttaccagatggagaagttgttggagactctgaaaaatttgagattgaaaactgtctagccaacaaggtggatttgagcttcagcccagcacaaagtcccccagcctcacatgcccacctgcaagtagcagctgctccgcagtccctctgtgcccttcgtgctgtggaccaaagtgtgctgctcatgaagcctgaggctgagctctctgtgtcctcagtatataatctgctaactgtgaaggatctcaccaattttcctgacaatgtggaccagcaggaggaagaacaaggacactgtccccgtcctttcttcattcataatggagccatctatgttcccttatcaagtaatgaagcagatatttatagcttcctcaaggggatgggattgaaggtgttcactaactcaaaaatccgaaaaccaaagtcgtgttcagtcatcccttccgtgtctgcaggagcagtaggtcaaggatactatggagcaggtctaggagtagtagagagaccatatgttcctcaattaggcacatataatgtgatacccttaaataatgaacaaagttcagggccagtccctgaaacggtgcgaagctattttcctgagacttggatctgggagttggtggcagtgaactcatcaggtgtggctgaggtaggagtaacagtccctgacaccatcaccgagtggaaggcaggggccttctgcctgtctgaagatgctggacttggtatctcttccactgcctctctccgagccttccagcccttctttgtggagctcacaatgccttactctgtgattcgtggagaggtcttcacactcaaggccacggtcctaaactaccttcccaaatgcatccgggtcagtgtgcagctgaaagcctctccagccttcctagcttcccaaaatacaaagggagaagaatcctattgtatctgtggaagtgagagacaaaccttgtcttggacagtgactcctaaaactctggggaatgtgaacttctcagtgagtgcagaggcaatgcagtccttagaactctgtggaaatgaggttgttgaggtccctgagattaaaagaaaagacacagtcatcaaaaccctgttggtggaggctgaaggtattgagcaagaaaagactttcagttccatgacctgtgcctcaggtgctaatgtgtctgagcagttgtccttgaagctcccatcaaatgtggtcaaagaatctgccagagcttctttctcagttctgggtgacatattaggttctgctatgcaaaatatacaaaatctcctccagatgccatatggctgtggagaacagaacatggtcctatttgctcctaacatctatgtcttgaactatctgaatgaaacccagcagctgacgcaggagatcaaggccaaggccgttggctatctcatcactggttaccagagacagctgaactacaaacaccaagatggctcctacagcacctttggggaacgatatggcaggaaccagggcaacacttggctcacagcttttgtactgaagactttcgcccaggctcgatcctacatcttcattgatgaagcacacattacccaatctctcacgtggctctcccagatgcagaaggacaatggctgtttcaggagctctgggtcactgctcaacaatgccataaagggaggtgtagaagatgaagcgaccctctccgcctatgttactattgcccttctggaaattcctctcccagtcactaaccctattgttcgcaatgccctgttctgcctggagtcagcctggaatgtagcaaaggaggggacccatgggagccatgtctacaccaaggcattgctggcctatgctttttccctactgggaaagcaaaatcagaatagagaagtactcaagtcacttaatgaggaagctgtgaagaaagacaactctgtccattgggagcgccctcagaaacccaaggcaccagtggggcatttttacgaaccccaggctccctctgctgaggtggagatgacatcctatgtgctcctcgcttatctcacggcccagccagccccaacctcggaggacctgacctctgcaaccaacatcgtgaagtggatcacgaagcagcagaatgcccagggcggtttctcctccacccaggacacagtggtggctctccatgctctgtccaaatatggagcagccacatttaccaggactgggaaggctgcacaggtgactatccagtcttcagggacattttccagcaaattccaagtggacaacaacaaccgcctgttactgcagcaggtctcattgccagagctccctggggaatatgtcataacagtaactggggaaagatgtgtgtatcttcagacatccatgaaatacaatattcttccagagaaagaggactccccatttgctttaaaagtgcagactgtgccccagacttgcgatggacacaaagcccacaccagctttcagatctcactgaccatcagttacacaggaaaccgtcctgcttccaatatggtgattgttgatgtaaagatggtatctggttttattcccctgaaaccaacagtaaaaatgcttgaaagatctagctctgtgagccggacagaagtgagcaacaaccatgtcctcatttatgtggaacaggtgacaaatcagacgctaagtttttccttcatggttctgcaagacatcccagtaggagacttgaagccagcaattgttaaagtctatgattactatgagacagatgagtctgtggttgctgagtatatcgccccctgcagcacagatacagagcatggaaatgtttgaggaccatacaggctgtatattttggtggattctctgtcctatacatttacttagaaggaatggagttatttgtctctataaaatagacactaaaaatatttgctgaataaatatgtacttctggtcaaactaaaaaa

SEQ ID NO: 406 - DNA, 2042 bp, Homo sapiens
  misc_feature: Incyte ID No: 366288.5
gcggcggcggcggtcatggaacgccaagaggagtctctgtccgcgcggccggccctggagaccgaggggctgcgcttcctgcacaccacggtgggctccctgctggccacctatggctggtacatcgtcttcagctgcatccttctctacgtggtctttcagaagctttccgcccggctaagagccttgaggcagaggcagctggaccgagctgcggctgctgtggaacctgatgttgttgttaaacgacaagaagctttagcagctgctcgactgaaaatgcaagaagaactaaatgcgcaagttgaaaagcataaggaaaaactgaaacaacttgaagaagaaaaaaggagacagaagattgaaatgtgggacagcatggcaagaaggaaaaagttacaaaggaaatgcaaagaagccccaggaggaagacagtcctgggccttccacttcatctgtcctgaaacggaaatcggacagaaagcctttgcggggaggaggttataacccgttgtctggtgaaggaggcggagcttgctcctggagacctggacgcagaggcccgtcatctggcggatgaggctaagaatcttgttagtgtcacttttgacattagcaagatgaacccttaaccctcgattcaattgccttacgcacgcttttcacagtgactagccaaggggaggtggggttgatttctgttcctaactacacctgcatatgtcagggctccagtcagcaaaaggtatagatgttgcctctaggcatgaggtcattggtcacattctacttggagacagtgattgcattcattgatttcatggttaattgctagttggtaggtaaaggcctctagatgattagcaatcttgataaaagaggcctagtaatgttcttttgaggttagaaatccttgctgctaggacagtctctgtgacaggttgcgttgaatgatgtcttccttatcaatggtgagcccaccagtgaggattactgatgtggacagttgatggggtttgtttctgtatatttatttttatgtacagaactttgtaaaaacgaaactatttaaaaaacaagaataacatttttagcatctttattcaaggagatttatggacttcaatttgtctatcaaacattaaatagctttttattacaacctccaactattacttatttctctatttattattactcacccgaaataagtctggcaagtggcagacagctgccgtgattttgaaagttgacagactccttggggttcatccacaaaattgggtgcttggagtcgagttgccgaattactgggataaagaaacatcgtgcctcaaggttcctcataggatgaccaggtttctacgtgacctctcagttattcccttacgccatgactcatcttttacgctcttgtccagaggcactatcagcagttttggataaagagccaaacagtaaatattttagactttacaggccacatatgatctctgtcacatagtcttaggtttttatatttttaaaggattgtttttaaaaaagattctctgctcatgggctggatttgggctgaatgctgtagtgtgtggaccccgtctagatcatcagaaggaaaaacattaaccttcagaatagggggtaattcgctgcaaaagtactatagaatggtctcatacataaattagtcaacatttgttatctcctgcaggtagaatattccgtggttgcttcttgaccaagggaaatacagtctggctgtgagagacttaaaatctcttgaggagcgctctggagaatggctgaaggagaggaaacaggagccttgagcagtgtaattacaaacaaataggttggcatagtcttaagtctttgagtctagagagatttgagttttgttttgcctgtggaggcaattgggggtttcaggtcaaagagagggtcagtggaaacaagggtgggccttgtgaggtgtggggaagccctgggaccctcactccccttccagtgtgtaactggattggctcccaccagcccagaag

SEQ ID NO: 407 - DNA, 2081 bp, Homo sapiens
  misc_feature: Incyte ID No: 1245800.1
tgaggaaagggagggttttctgatctctcccaattagaggattaggcaattggcagcgcagggcggtaactctgggcggggctgggcgccagggctggacagcacagtccctctgagctgcacggagacctcgcaggccccgagaactgtcgcccttccacgatgtggctccgtgcctttatcctggccactctctctgcttccgcggcttgggcagggcatccgtcctcgccacctgtggtgggacaccgtgcatggcaaagtgctggggaagttcgtcagcttagaaggatttgcacagcctgtggccattttcctgggaatcccttttgccaagccgcctcttggacccctgaggtttactccaccgcagcctgcagaaccatggagctttgtgaagaatgccacctcgtaccctcctatgtgcacccaagatcccaaggcggggcagttactctcagagctatttacaaaccgaaaggagaacattcctctcaagctttctgaagactgtctttacctcaatatttacactcctgctgacttgaccaagaaaaacaggctgccggtgatggtgtggatccacggaggggggctgatggtgggtgcggcatcaacctatgatgggctggcccttgctgcccatgaaaacgtggtggtggtgaccattcaatatcgcctgggcatctggggattcttcagcacaggggatgaacacagccgggggaactggggtcacctggaccaggtggctgccctgcgctgggtccaggacaacattgccagctttggagggaacccaggctctgtgaccatctttggagagtcagcgggaggagaaagtgtctctgttcttgttttgtctccattggccaagaacctcttccaccgggccatttctgagagtggcgtggccctcacttctgttctggtgaagaaaggtgatgtcaagcccttggctgagcaaattgctatcactgctgggtgcaaaaccaccacctctgctgtcatggttcactgcctgcgacagaagacggaagaggagctcttggagacgacattgaaaatgaaattcttatctctggacttacagggagaccccagagagagtcaaccccttctgggcactgtgattgatgggatgctgctgctgaaaacacctgaagagcttcaagctgaaaggaatttccacactgtcccctacatggtcggaattaacaagcaggagtttggctggttgattccaatgcagttgatgagctatccactctccgaagggcaactggaccagaagacagccatgtcactcctgtggaagtcctatccccttgtttgcattgctaaggaactgattccagaagccactgagaaatacttaggaggaacagacgacactgtcaaaaagaaagacctgttcctggacttgatagcagatgtgatgtttggtgtcccatctgtgattgtggcccggaaccacagagatgctggagcacccacctacatgtatgagtttcagtaccgtccaagcttctcatcagacatgaaacccaagacggtgataggagaccacggggatgagctcttctccgtctttggggccccatttttaaaagagggtgcctcagaagaggagatcagacttagcaagatggtgatgaaattctgggccaactttgctcgcaatggaaaccccaatggggaagggctgccccactggccagagtacaaccagaaggaagggtatctgcagattggtgccaacacccaggcggcccagaagctgaaggacaaagaagtagctttctggaccaacctctttgccaagaaggcagtggagaagccaccccagacagaacacatagagctgtgaatgaagatccagccggccttgggagcctggaggagcaaagactggggtcttttgcgaaagggattgcaggttcagaaggcatcttaccatggctggggaattgtctggtggtggggggcaggggacagaggccatgaaggagcaagttttgtatttgtgacctcagctttgggaataaaggatcttttgaaggccaaaaaaaaaaaaaagg

SEQ ID NO: 408 - DNA, 2053 bp, Homo sapiens
  misc_feature: Incyte ID No: 196677.1
ttggaaacccgagcaagttcggaccaagccgcttcacggatggcatcaccaacaagctggtggcctgctatgtggaggaggacatgcaggactgcgtgctggtccggttgtatggggagcggacggagctgctggtggaccgggagaatgaggtcagaaacttccagctgctgcgagcacacagctgtgcccccaaactctactgcaccttccagaatgggctgtgctatgagtacatgcagggtgtggccctggagcctgagcacatccgtgagccccggcttttcaggttaatcgccttagaaatggcaaagattcatactatccacgccaacggcagcctgcccaagcccatcctctggcacaagatgcacaattatttcacgcttgtgaagaacgagatcaaccccagcctttctgcagatgtccctaaggtagaggtgttggaacgggagctggcctggctgaaggagcatctgtcccagctggagtcccctgtggtgttttgtcacaatgacctgctctgcaagaatatcatctatgacagcatcaaaggtcacgtgcggttcattgactatgaatatgctggctacaactaccaagcttttgacattggcaaccatttcaatgagtttgcaggcgtgaatgaggtggattactgcctgtacccggcgcgggagacccagctgcagtggctgcactactacctgcaggcacaaaaggggatggccgtgacccccagggaggtgcaaaggctctacgtgcaagtcaacaagtttgccctggcgtctcacttcttctgggctctctgggccctcatccagaaccagtactccaccatcgactttgatttcctcaggtacgcagtgatccgattcaaccagtacttcaaggtgaagcctcaagcgtcagccttggagatgccaaagtgaccagccaccccatccctcccctacccatctgtctggccagacctgttctccagagctcaattctgcactctgggatccacacccttggacagggtgggagaggggacacatgggtgtccagggagaaggctctgtccctgccgccagaccccagtggttgccactgaagacctcattctcctgtctggaggggctgataggacccccttccgggggtccccttcaccccaccaggcttgggaggaagtgcctgcagccaggtcctgaaccataaccacccctgggaaacacatcattcccagcctcaggccctgctggaattggggctgccttatatgtgtgtttaccccttcctggcctggggaaggaggcggggagggctcctttctacctccagtgccctgagcctccagtccgtctccccctgcatgccccatgtgggaggtgctgagctccaaaccagcatcacaccaactctgacacatggatgtacctatcttggtgatgggtgggggccaagaattgagcatgacatcttccccagcagccacctcctctgagatccctcaccttctccaaaccagatccaatcaaacctcagcccgaggaaacatgctccccaacgtgctctcctgtgcttctgttttgtccccctgctggggggacaggagagggagtggtgaggccctgggcctccagagcctggctctgctttgtgctgtggcttagccggaggggacgtggccaagggtgaggtggccaaaaccagaaccagcagtctcctgccttgttccctccctggccctcaggccctccttccagggatgtctctccagctctactttatgtcctgaagctgacccgaggtcttcctatctggaatgactagagggagccaagaggatggggtgggggccagggccccccagggcctatcgtgggagagcctgggcaggatcccatcagaaaggtgctgactaaactggttgcccggacactcaacagcctccacctccctttctaccctcacagctcctggggccttcctggctctggcccagaaagtgattcatttgtaaattatcatggttttctttctgcattaaaatgctcatttccgg

SEQ ID NO: 409 - DNA, 2964 bp, Homo sapiens
  misc_feature: Incyte ID No: 232589.78
  unsure 709, 877, 879-880: a, t, c, g, or other
aacccctccgagatgacatagtgcaaggtaggaatgattccactcaggccgccagcctatctgccctatggtggcggccttaaggaacccctccgagatgacatagtgcagataggctggttgatgctgatggccagcctctacatcacaggagctgccctgtatgctgcccggatccccgaacgctttttccctggcaaatgtgacatctggtttcactctcatcagctgtttcatatctttgtggttgctggagcttttgttcacttccatggtgtctcaaacctccaggagtttcgtttcatgatcggcgggggctgcagtgaagaggatgcactgtgatacctaccagtctccagggactatgaccctaaaccagggcctgcggcacttgcgggcctccctgctggctactgatgccagtaccagaggagccccaaaactttgacagcctcgtgggctttgtgacggcccaagggctctgcgtggtacatgactgagaagagaaaaacaaaaataaatcatacctcaaaggatggagtgcatcaattgggagaaaaggagacatagcccaaaccctggcttattcttgggatctactgattgcgggctctgcaagacccttggcaaactggcttctgatccatatcatatttatttgtagaagatggcgaaacagtttagctggtggttctttcttctccctttntctctctctatgacaataatacaaaccaatttaagtgaacatttatatccgataaggggtgggagtgtgattttaaatgctcttttgggagaacaaagaaattaatgtaaataagatttctaactgtttaaataagactttatataaatgtttaaaacataggggtantnnacggagggagaatttttgtatagaatgaaacatgcaagtaccacacactgtttgaattttgcacaaaaagtgactgtaggatcaggtgatagccccggaatgtacagtgtcttggtgcaccaagatgccttctaaaggctgacataccttggaccctaatggggcagagagtatagccctagcccagtggtgacatgaccactccctttgggaggcctgaggtagaggggagtggtatgtgttttctcagtggaagcagcacatgagtgggtgacaggatgttagataaaggctctagttagggtgtcattgtcatttgagagactgacacactcctagcagctggtaaaggggtgctggaggccatggaggagctctagaaacattagcatgggctgatctgattacttcctggcatcccgctcacttttatgggaagtcttattagagggatgggacagttttccatatccttgctgtggagctctggaacactctctaaatttccctctattaaaaatcactgccctaactacacttcctccttgagggaatagaaatggacctttctctgacatagttcttggcatgggagccagccacaaatgagattctgacgtgtccaggtttctcctgagctcatctacatagattggtagacccttcctttggattaggaaagatgagttttacctctggtacactgtcttggtaagcctggatgtgacagacacctcggctctccttgaataagaaagccagcagaactcttaaagccagttgtagtacggagttgtcagcactcactgaacctcactttacagggataagagtggtgtggcattttaaatacaatggtatgttattgccagggagtgaggtacaagacgatggctcatgtcacaggcctacctgatacggtgtcagagaaagtggtggggaaaggatctggttcatggaattctgatcttggcccataggtgaaccaccaaaatagtgctcgagtcttaggttactgtcatcaaagacttgggatgactccattatatcctggggttgtgggtattagaactaaatatggaggtcctgagcatggggactggcgtcctcagtaggtgtttgggaatatgggaagggtctcctatttattcaatagagttttctcagttattttcctcctttgcccttgcaatctccagcaaaaggtgggatctaggaagaaagaatccagtgtagaagttgagaagaacttgaacgttttggttctggataaggtcactgtcctaggtgctaggtggaccgagcaaaagactcagtggatgaactggtgcagtgcctgacagaataaagaacagtattaatccctttgagaaagcatagtccagcaggacagtggccatttggacagaagcccacttagtttcttgggagcaacagcacgtatcagaagccagacttgctcttcggtcatgcactttgggatacagcgtataggtgcagccctgtcacaacaccaacagaagtagcagcctctgggtgcagtcacccacaccccaaagctggaaggatctggttcaacatagcacaaacccttaggaaaaatgaaattaacatcactgatgtgtaatccagtaaaatctccctttttcgggtgtgtatgtgggcatgtgcccatttctatgtgtgtgtctacgtgcagctcactaccaacagcctcatgtgcacttgacctgacagtgctcgctgagaactctcaccaggttggcgcctgaatgccttactctcagcagtcagaggcttgcttgctctgtgcagatttttaattttcttttttggccctaggctggttgggacctctacagcttcattctttcaccattaaatagtggcctttttcagtattttccctcttcccctttataaattatgctaaagccacaaagcacatttttggggatcatagaaggttggggttccagaaaggcatctgtgtgatggttccattgatgtgggatttccctacttgctgtattctcagtttctaataaaaagaaccaaatgaaatatgaaaaacacaaaaaagg

SEQ ID NO: 410 - DNA, 380 bp, Homo sapiens
  misc_feature: Incyte ID No: 308057.1
  unsure 265-286: a, t, c, g, or other
caacagtcacctacctagctcactcagggctttaacagtaggcccttccacactgacagttctcatcccagctgtacgtgggtgaacgcagtgcatgcagtttgcagacagacacctcaccaagcctctgcattggaaacccggcagtgtaacaaaacactgtcccataggctcagtgctcaaaactaaaatgtggtaagtcactctccaggagtgtgcttctagcttccctaccctcttgctggacacgagcctgtcagaatannnnnnnnnnnnnnnnnnnnnntccacttaagaacctactctcaccttgcattaaaggaaatcagaatcaagataccctcccatctgcagaccatctcctctcatgcactcaaggg

SEQ ID NO: 411 - DNA, 498 bp, Homo sapiens
  misc_feature: Incyte ID No: 1137592.1
  unsure 114, 363: a, t, c, g, or other
ggccgagcaagcccagctaggtatggcgatggtgaagcggttctttgaatcttaccatgaggtccccgacggcacccagtgtcatcgcaagacctacatcaccacggccttagncggcatttgcggcataatcggctccgcttacagcgtctcactcaaccccgcagattccaccctggaagcagtggacagagtcggccggtacacattcactgcagctgctattggagcgatgtttggccttaccacctgtgtcagtgcccaggtccgagagaagccagatgaccccctgaactacttcattggttggctgcgcgggaggccttgacatttgggagctcgcactcacagctatgggactancaccatgggctgtgtctacatggcactgcggccgccctgttcaagatcggcaagctggaaggctgggagttgttccctacccccaaaggtgtgagccaaacccctgtgacaaataaacgctgtatgttcctgtga

SEQ ID NO: 412 - DNA, 2211 bp, Homo sapiens
  misc_feature: Incyte ID No: 978146.2
ggggccgctgcgcggtatcgacgagtactcggacgcggcagcggacggtcggcgcctctgcaggacgcggagctggccctggccggcatcaacatgctgctcaacaacggcttcagggagtcggaccagcttttcaaacaatacagaaatcatagcccactaatgagttttggagccagctttgtcagttttttgaatgccatgatgacatttgaggaagaaaaaatgcagttggcatgtgatgacttaaaaaccacagaaaaactgtgtgaaagtgaagaggctggagtaattgaaacaatcaagaataaaattaagaagaacgttgatgtccgaaaatccgccccctctatggttgatcggcttcagaggcagataatcatagctgactgccaggtttacctggctgtgctttcatttgtaaaacaagaattgtcagcttatatcaaaggtgggtggatccttaggaaagcctggaagatttacaataaatgctatctggacatcaatgcccttcaggagctgtatcagaagaagctaacttgaagagtccttgacttctgatgctgcaaaatgataatcacattgtggctgaaggggtgcctgaggagctctgaacagactgaaaggtgctgttagctttggatatggcctttttcacctttgcatatccatggtgcccccaaacctgctcaaaatcatcaacctgctgggttttcctggagaccgcctacaggggctttcttcactgatgttacgcaagcgaaagtaaggacatgaaggcccctttagctacattagctctgctcgtggtatcatactgtagtccgcccgttttttgccttggatggcagtgataacaaggcaggcctgggatgaagctaaggaaattctccttaaaaaagaagctgcttatccaaattcttccctctttatgtttttcaagggacggatacaacgactagagtgtcaaatcaacagtgccttgacatctttccacactgctttggaacttgcagtagaccagagagaaattcaacatgtctgtctgtatgaaattggttggtgcagcatgatagagctcaatttcaaggatgcatttgattcctttgagaggctaaaaaatgagtccaggtggtcccagtgctattatgcctacttgactgcagtttgtcagggagccactggtgatgtggactggggcacagattgtctttaaagaagttcagaaactcttcaaaaggaaaaacaatcagattgaacagttctcggtgaaaaaggcagagcgatttcggaagcaaaccccaaccaaagcgctctgtgtgtaggcgtctattgaagtgttgtacttgtggaaagctcttccaaactgttccttccccatactgcagaggatgagtcaagcttgccatgaagtggatgactcatctgttgttggattaaagtatttgcttcttggtgccatacaccaaatgtctaggaaactcagaagatgctgttcagtactttccagcgagctgttaaagatgaattgtgtcgtcagaataatttatatgttcagccgtatgcctgttatgaacttggctgtcttctatatagacaaaccagagactgtaggaagaggcagagctctacttcttcaagcaaaggaggatttctctgggctacgactttgaaaacagattgcatgtccgcatccatgctgctctggcctctctgagggaattggttcctcagtgacagacccggaacacccgctccgtccctccccacccagggtccgcacctttaaaataaaagcagaggacaaagctcttgtgaagatgggcttttcttctgaaaatctcaactgtgccagggacacattttcccagttaagctgacatattaaagatctcctcttttaaacatgtagctgaaaagtaataatgatgttgaggaggatgatgatggtaataataacctaacccacccggggagagggttaagtgaccttgcctcaaacgttttagttttgtgaatttattatttttaaaataaaatcaaacggaacatccaacccaagatcctgtaggaacacctaccttaagcacatatctgaatgggtaacatgatgaggtacctgtaaaattattaacaatatcatgacatagcatttatatttgtgttttgaaaaaataaaagtgctttctagtgttttactttatcctc

SEQ ID NO: 413 - DNA, 1047 bp, Homo sapiens
  misc_feature: Incyte ID No: 347045.1
gggcgcgtcactgctggctgaaggctgcgctcaggcccgtggatctcatcgaagatggcggcgcgattctgtgtcgggcattaccagaagagtcttcatgtggacagtctcagggacaccatgtagagaattttggtctcgattcagaaaagagaaagagccagtggttgttgagacagtagaagagaaaaaggaacctatcctagtgtgtccacctttacgaagccgagcatacacaccacctgaagatctccagagtcgtttggaatcttacgttaaagaagtttttggttcatctcttcctagtaattggcaagacatctccctggaagatagtcgtctaaagttcaatcttctggctcatttagctgatgacttgggtcatgtagtccctaactccagactccaccagatgtgcagggttagagatgttcttgatttctataatgtccctattcaagatagatctaaatttgatgaactcagtgccagtaatctgccccccaatttgaaaatcacttggagttactaagcaattcggaagagaaacacattgaaatcactgtctttccctgagcaagggggctgctcattagatcttttgatactttaccatgtgaaatactaccagaactgttctctaaacccactttttctgtagaggaatgtatcatctttttttttctcatattacaaatggacaaataacggactttctattttcatatttgctgaaaccattttttaaatgaaattaggtcattatttatgaaaagttttgagagggcactgtcaacttgggtttaagacaggaggacattgcaagttcacacctttcataagcataaagtagttgcaagaaagtattttcatcctgttaggattcatatctaagatagagttatgcattgcacatacacaaataaacttttattagatagatacctataaaagaaacataaaagtatgttgtgtattactgacagttctagattaatttcttttagaattaaagtagatttgttaaagtgtaaaaaaaaaaaaaaa

SEQ ID NO: 414 - DNA, 3328 bp, Homo sapiens
  misc_feature: Incyte ID No: 234482.3
tgcgactccggagccggcggggggctccggtccttccctgcgccaccgcacaggacatctctctggctggggagcggcggtgagacccgccgagggcgtctgtgtccctcctcccccgcggtcctcggtgcgtccgcacgcccctcctcctcggctccctccttcttctctccgcgcctctccgccccctccccgtctccgcaggccgagtggtgcggcccgcctccagctgaccggcctggaatcccggctccgagccccggactcgcgcccgcccgcgcgcccgctccttccccctccccccgccccgagccccccgacgccgccgccaccgcctcctcagagcggggcccgggcccagccgccgccaccgctgccgccgccgagctccgccgccgccgagcaccatgggagacgctgggagcgagcgcacaaagcgcccagcctgccgcctcgctgtccctgcggcttctgggggtccagcaagactatgaatctctgttccaaatgctttgctgattttcaaaagaaacagccagacgatgattccgctccaagtacaagtaacagccaatcagatttgttttccgaagagaccaccagtgacaacaacaatacctcgataaccacgccaactcttagtcccagccagcagccgcttccgacagaactgaatgtaacttcaccgagtaaagaggagtgtgggccatgcacagacacagctcatgtctcattaatcacaccaacaaaaagatcctgtggtacagattcacagtctgagaatgaggcttcaccagtaaaacggccacgactacttgagaatacggaacggtccgaggaaaccagtcgatctaaacagaagagtcgacgtcggtgcttccagtgccaaaccaaactggagctggtgcagcaggaattgggatcgtgtcgctgcggttatgtgttctgtatgttacatcgcctccccgagcagcacgactgcacattcgaccacatgggccgtggccgggaggaagccatcatgaaaatggtgaagctggaccggaaagtggggcgctcctgccagcgcatcggggaggggtgctcctgaaggccaggcatggccaccacgtgacgctgttcttagttcactaatgttagccttatttaggacaaagtcagccagacaccttgtactgggcacgcgtcagactgcagccagtccgtttcctttctttagccagccatcctggtactgtagtttaggggttgatggtggttgaaattgatttctggctggttactaaggtgcctgctagccattgtataaaattaaaacatgaagaatattttttttttgagcatggctagtggatttaaaacaacacatacctgtcactgctggagtcaaacttataaaaagccttaagtggaaagtgttccagacggagactctgagttaatagaggagtagaagctggtgttaaagttcccacgacgcacatggctttgccagaaactctgtttaatgatcggcctttcacctcttcacttatccttagtcccagtagccaggatacctgatggccacgtgtgccttggccacgggaggctgctgagattggccacgtggctgggctgggtggtggcctcactctcccacagagctggaaatggggggtgggggacagattcttacggaaatttttttacctgacttgctatgaaaaaactcatcacacaagaagagaaacagtaacctcactttgaaaattagctccactcaagactagtccacgaacgagacccgccttttctacacaggatccaaggtcacgagaagcagccagagtgccccgcctccgccggctctggtctgccattcgccagtgcagggatctggcacggaccagatgtggcgaatggcagcacagcgcggtggctgggtctgcacactggcctctgcagccagatttctatattgggagttttttaaaaagacatttcatagccaacaagaatcagtagaagtgctgggagcagcagctggggaagctgccgcccacgggctctgccccttccagctggagccgcccgtgcctccaggggccaagaggatgatgtcgtggcctccattctcgtttctatgcagccccatagtccaaggacacccagtccacatctaccatatagcaagtttagtaagggaaggcagcatacgtcccagggacagtgggtttggatctgtctagaacagcggtttgtggctgtggcccagctccgagagtgatatttgctctggtaggtgagggcctgagggtacatttctccacctgtgccccctcatgttcacagaggatttcagcagctgcaactgcgcacgccaggtggggaagggtgggggtgggcctggttgccccatgttaggaaatcactaccagtccaggtggggctggggctgggtggacaggatcaggattcccttgaaagcccaggcagggtgagcagtcccagtggtcctagtgccgcatcagatccaggtgggtgagggcaggaggcccctgcggaggcagcgtggatctgcccacacataggctactggaatagtttaacccagcaactttcctttttataaaacaacaaatggttcaactctgtctgcaaattaacagctgaacacctgcaactgcaaatgttttttgatccgacgtactgaaataggaagtcatgctcttcccaccctccacccaccagagtggaacccgctgcaaaatccccagccttaattcttgcttcaggacccagaccggtgtcttgctctagggcaacccagggcagaggggccaggtctgcccagcgtttaccactgctgtcaagccacagcccttggccaccatacgggccatcctcagtgaggcagccccccataggcttccgccaagctctggtcccgaagaggctgtgcgagcccttcccggccctccccagggccccccgccccctcctctgcctgctgcgtggaggcagccatgggaaggagcccaggggagctggcctgggggagcgaagcccatgttcgcttcctgacttagagctggggggggtggggggtggggcttgttcccctgcagtatctgttctgtgaagtttgttaaatgtaaggaaagcttaaattcttgtatctttaaaagagaaaatcttatttaacccttttgtgttctagatttacttacacacatagcctagagctcagttttagttttaacattgtgaaaatattaaaagaatcttgtaactttattcttttttctcctgctgaaaaaaaaaattaaaccaatcgtatgaaaaa

SEQ ID NO: 415 - DNA, 1744 bp, Homo sapiens
  misc_feature: Incyte ID No: 027980.2
ccggaggttgcgggaggagcagcagagggagcgcctccgccaggtacgccgccgccgctccccggcccggccatgcccggcccgcgccgccgctcaccgtccgcctgcccgcaggtgtcgcgcatcctgaggaaggcggcggcggagcgcagcgccgaggagggccggctgctggccgagagcgcggacctggtaacggagctgcagggccggagccggcggcgcgagggcctgaagcggcggcaggaggaggtgtgcgacgacccggaggagctgcgggggaaggtccgggagctggccagcgccgtccggaaaggccaaatacttggtcgtctacacaggcgcgggaatcagcacggcagcgtctatcccagactaccggggccctaatggagtgtggacactgcttcagaaagggagaagcgttagtgctgccgacctgagcgaggcccgacccaaccctcacccacatgagcattacccgtctgcattgagcagaagctggtgcagcatgtggtgtctcagaactgatacgggctccacctgaggagtgggctgccgcgcacggccatctccgagctccacgggaacatgtacattgaagtctgtacctcctgcgttcccaacaggggggtacgtgcgggtgttcgatgtgacggagcgcactggcctccacagagaccagacaggccggacctgccacaagtgtgggacccagctgcgggacaccattgtgcactttggggagagggggacgttggggcagcctctgaactgggaagcggcgaccgaggactgtcagcagagcagacaccatcctgtgtctagggtccagcctgaaggctctaaagaagtacccacgcctctggtgcatgaccaagccccctagccggcggccgaagctttacatcgtgaacctgcagtggaccccgaaggatgatctgggcttgccctgaagctacatgggaagtgtgatgacgtcatgcggctcctcatggccgagctgggcttggagatccccgcctatagcaggttgcagggatcccatgttctcactgggcgactcccctgcgtgctggtgaagaaggcagccacagttcggaagtcgctgtgcagaagcagagaggaggccccgccgtggggacccggggtgcacccgcttagcttcggcccccattcctagggggctgggtttggcaggggctgcacaaaacgcacaaaaaggaaggaaaggtgagttattcacgtgctcgatgaagaacagttggcactttgccagatggccagtgtcacggtgaaggctggggttgcccccacgggtctagggatgaacgaactctttggggatgacattttcaccgtgcacatttttagccatttggtccttgatgaagtcccttgtgactgttgcggttgtaccctgcatacggcctgggccatcgaggacacctgccccatccggcctctgtgtcaagagtgtggcagtcgcacctttctgtgagaacgggaactcggggttattttaagccccggcctgcagagtggaagcgccccagcgggcctttcctcgctcaccaggccagtctcagggcctcaccgtatttctactactacttaatgaaaaagtgtgaactttatagaatcctctctgtactggatgtgcggcacgaggggtggctcccgagcctcgggctctatgcagacctttttatttctattaaacgtttctgcactggcaaaaaaa

SEQ ID NO: 416 - DNA, 562 bp, Homo sapiens
  misc_feature: Incyte ID No: 1327511.1
gctgaggtgcacgccgtgctgagacagctacaggacatccttaaggaggcctctcttcgcttcactctccccggccccagcaccgagggtcctgccaagcaggagaacttcatcctgggcagctgtggcacagaccaggtgaaaggggtgctgactctgcaaggggatgccctcagccaagcggatgtgaacttgaagatgcctcggaacaaccagttgttgcacttcgccttccgggaagacaagcagtggaagctacagcagattcaggatgccaggaaccacgtgagccaagctatttatctcctggcaaaccgggatgagagctaccagttcaagacaggagcggaagtcctcaagctcatggatgccgttatgctgcaactgacgagagccagaaaccggcccactaccccagccaccctcaccctgccagagattgccgccagcggcctcacgcggatgtttgcccccaccctaccctctgacctgctggtcaatgtctacatcaacctcaacaagctgtgcctcactgtgtaccagctgcaacactctgcagccc

SEQ ID NO: 417 - DNA, 2268 bp, Homo sapiens
  misc_feature: Incyte ID No: 223416.6
cttcccaccccagctgaacccaggtgaggccaggccacgttgttccttccccccgctgacttggagggaggggggcttctggaaggagcactgggccgggcctgagtgggcgctaccagctcccctccttccctctgttccacaggaggcctctctgcgcttcactctgccgggctccggcactgaggggcccgccaagcaagagaacttcatcctaggcagctgtgggtgagcctgggctaggcggaaaccggggaaatgggtaccttggggggtaggaggcatggccatagccctgtcctgcagaccagctggttgtgcgatgggacaggaggggcagcccgccgggagggagggctgggtggtgggggggtgaccacaggcaccgctctgacgccacatgttacagcacagaccaggtgaagggtgtgctgactctgcagggggatgccctcagccaggcggtgagtcccccggccctgtcccctcccatcctgccaatggggaagagcatgggagctcccactttctctctgtacaagccctgcgactctgggcgggacccttgatctctctggcctcagttttctcctttggaaaatgacagcaaccctcacaccttctcccgggatcggtgtgcagattcagtaagaggtgcaggagaggggttctttgcacacggcctggcctggcgtccggaccagtgaaacatgggcattggtggattaggctggccacacatcacagttgaatcagccaatgcctgaactccagtctgcacccgactctgtgccaggcaccaaggcgtggggggaggcccccctcctgggctccatctgttgccctttgtagacactagatgcaccccgttcgcacagagcctcacagaggctgcctttcctcttccccttcccctttcttcacctctttccatttcacttctttgtggctcttcttgggcctggtttcctgtttcctgacctccctgttcaacccccaaacggccaaggcattgggagaccctctgccctatacagcggccaaggcctgaaccaccacacaccccatttctgccctgggcttaagggctcagagtggctgtggcaggaggtgcccccccactgcccagctcaccccactcttgcctgtcaggatgtgaacctgaagatgccccggaacaaccagctgctgcacttcgccttccgggaggacaagcagtggaagctgcagcagatccaggatgccagaaaccatgtgagccaagccatttacctgcttaccagccgggaccagagctaccagttcaagacgggcgctgaggtcctcaagctgatggacgcagtgatgctgcagctgaccagagcccgaaaccggctcaccacccccgccaccctcaccctccccgagatcgccgccagcggcctcacgcggatgttcgcccctgccctgccgtccgacctgctggtcaacgtctacatcaacctcaacaagctctgcctcacggtgtaccagctgcatgccctgcagcccaactccaccaagaacttccgcccagctgggggcgcggtgctgcatagccctggggccatgttcgagtggggctctcagcgcctggaggtgagccacgtgcacaaagtggagtgcgtgatcccctggctcaacgacgccctggtctacttcaccgtctccctgcagctctgccagcagctcaaggacaagatctccgtgttctccagctactggagctacagacccttctgatcacagcacccaggagcttgtctccaggaaggcggccccgtcccctactcatacccaccacagagcaccagccagtgccaacgccaggctgctatttatctccctatcccaccccctaccccacctaacacatttgcactgccgggaatggacactggaagtgccaggaggaaggaaggctggtttggtggggtagtggggaggtcagggaggcggggccaagggtgtcccacattcccaacaccgccctctgatcaccatgggaatctttggactcaggacagggccaggcgcagggctctccctcctctccccttcgctgtcccctccccctggagggcatggtgtcggggggtggcactgagctatgagtcccggggatggtgaggaacgccacagacagagccaccctaggagtgagtatagtgctggtgactgtgtttcatagccccagtccagggctgtctaagaaataaagatcatcagactccaaaaaaaaaaaaaagg

SEQ ID NO: 418 - DNA, 5795 bp, Homo sapiens
  misc_feature: Incyte ID No: 380601.63
cgcagatatatcctgtggcaagtgatggtaaatgctgtggcaagaaagcaggttctggaggtgaagggcggtgggggagacagggcagggaaggtgagcagcggtctgagagtcccttgtggcacctcgtgggcattagccaaagccgtcctgatcccaagggacagggcagggaaggtgagtagtggtccgagagtcccttgtggcacctcatgggcgtcggtcaaagccgtcatgaccccaaggatgtgccaggagtcagggcctctcctcctacgtgggcctgaaggggctgctgtaattcaggagggtaggcttgggatgaagggtctggaatttctgtctgccagcattagcctaatgcaaatcttttcctattcttttctattgagttaaaggtcctggtggcattgtcgggtggggcacattgctgttgtcatagggctgtttgccttgtgtttcgtggagccccattgctgagcttacaacgtcactctgctctcagctcccacggcctaaccatgaccatcctccctgcaggcattggttcctgtcaccattgaagtagaggtgccctttgaccttcaccgttacgttattgggcagaaaggaagtgggatccgcaagatgatggatgagtttgaggtgaacatacatgtcccggcacctgagctggcaggctgacatcatcgccatcacgggcctcgctgcaaatttggaccgggccaaggctggactgctggagcgtgtgaaggagctacaggccgagcaggaggaccgggctttaaggagttttaagctgagtgtcactgtagaccccaaataccatcccaagattatcgggagaaagggggcagtaattacccaaatccggttggagcatgacgtgaacatccagtttcctgataaggagagcgaccctccaacctacaaggatgccttccctccacttcctgagaaagctgcttgcctggaaagtgcccaggaacccgctggagcctgggggaacaagatccgacccatcaaggcttctgtcatcactcaggtgttccatgtacccctggaggagagaaaatacaaggatatgaaccagtttggagaaggtgaacaagcaaaaatctgccttgagatcatgcagagaactggtgctcacttggagctgtctttggccaaagaccaaggcctctccatcatggtgtcaggaaagctggatgctgtcatgaaagctcggaaggacattgttgctagactgcagactcaggcctcagcaactgttgccattcccaaagaacaccatcgctttgttattggcaaaaatggagagaaactgcaagacttggagctaaaaactgcaaccaaaatccagatcccacgcccagatgaccccagcaatcagatcaagatcactggcaccaaagagggcatcgagaaagctcgccatgaagtcttactcatctctgccgagcaggacaaacgtgctgtggagaggctagaagtagaaaaggcattccaccccttcatcgctgggccgtataatagactggttggcgagatcatgcaggagacaggcacgcgcatcaacatccccccacccagcgtgaaccggacagagattgtcttcactggagagaaggaacagttggctcaggctgtggctcgcatcaagaagatttatgaggagaagaaaaagaagactacaaccattgcagtggaagtgaagaaatcccaacacaagtatgtcattgggcccaagggcaattcattgcaggagatccttgagagaactggagtttccgttgagatcccaccctcagacagcatctctgagactgtaatacttcgaggcgaacctgaaaagttaggtcaggcgttgactgaagtctatgccaaggccaatagcttcaccgtctcctctgtcgccgccccttcctggcttcaccgtttcatcattggcaagaaagggcagaacctggccaaaatcactcagcagatgccaaaggttcacatcgagttcacagagggcgaagacaagatcaccctggagggccctacagaggatgtcaatgtggcccaggaacagatagaaggcatggtcaaagatttgattaaccggatggactatgtggagatcaacatcgaccacaagttccacaggcacctcattgggaagagcggtgccaacataaacagaatcaaagaccagtacaaggtgtccgtgcgcatccctcctgacagtgagaagagcaatttgatccgcatcgagggggacccacagggcgtgcagcaggccaagcgagagctgctggagcttgcatctcgcatggaaaatgagcgtaccaaggatctaatcattgagcaaagatttcatcgcacaatcattgggcagaagggtgaacggatccgtgaaattcgtgacaaattcccagaggtcatcattaactttccagacccagcacaaaaaagtgacattgtccagctcagaggacctaagaatgaggtggaaaaatgcacaaaatacatgcagaagatggtggcagatctggtggaaaatagctattcaatttctgttccgatcttcaaacagtttcacaagaatatcattgggaaaggaggcgcaaacattaaaaagattcgtgaagaaagcaacaccaaaatcgaccttccagcagagaatagcaattcagagaccattatcatcacaggcaagcgagccaactgcgaagctgcccggagcaggattctgtctattcagaaagacctggccaacatagccgaggtagaggtctccatccctgccaagctgcacaactccctcattggcaccaagggccgtctgatccgctccatcatggaggagtgcggcggggtccacattcactttcccgtggaaggttcaggaagcgacaccgttgttatcaggggcccttcctcggatgtggagaaggccaagaagcagctcctgcatctggcggaggagaagcaaaccaagagtttcactgttgacatccgcgccaagccagaataccacaaattcctcatcggcaaggggggcggcaaaattcgcaaggtgcgcgacagcactggagcacgtgtcatcttccctgcggctgaggacaaggaccaggacctgatcaccatcattggaaaggaggacgccgtccgagaggcacagaaggagctggaggccttgatccaaaacctggataatgtggtggaagactccatgctggtggaccccaagcaccaccgccacttcgtcatccgcagaggccaggtcttgcgggagattgctgaagagtatggcggggtgatggtcagcttcccacgctctggcacacagagcgacaaagtcaccctcaagggcgccaaggactgtgtggaggcagccaagaaacgcattcaggagatcattgaggacctggaagctcaggtgacattagaatgtgctataccccagaaattccatcgatctgtcatgggccccaaaggttccagaatccagcagattactcgggatttcagtgttcaaattaaattcccagacagagaggagaacgcagttcacagtacagagccagttgtccaggagaatggggacgaagctggggaggggagagaggctaaagattgtgaccccggctctccaaggaggtgtgacatcatcatcatctctggccggaaagaaaagtgtgaggctgccaaggaagctctggaggcattggttcctgtcaccattgaagtagaggtgccctttgaccttcaccgttacgttattgggcagaaaggaagtgggatccgcaagatgatggatgagtttgaggtgaacatacatgtcccggcacctgagctgcagtctgacatcatcgccatcacgggcctcgctgcaaatttggaccgggccaaggctggactgctggagcgtgtgaaggagctacaggccgagcaggaggaccgggctttaaggagttttaagctgagtgtcactgtagaccccaaataccatcccaagattatcgggagaaagggggcagtaattacccaaatccggttggagcatgacgtgaacatccagtttcctgataaggacgatgggaaccagccccaggaccaaattaccatcacagggtacgaaaagaacacagaagctgccagggatgctatactgagaattgtgggtgaacttgagcagatggtttctgaggacgtcccgctggaccaccgcgttcacgcccgcatcattggtgcccgcggcaaagccattcgcaaaatcatggacgaattcaaggtggacattcgcttcccacagagcggagccccagaccccaactgcgtcactgtgacggggctcccagagaatgtggaggaagccatcgaccacatcctcaatctggaggaggaatacctagctgacgtggtggacagtgaggcgctgcaggtatacatgaaacccccagcacacgaagaggccaaggcaccttccagaggctttgtggtgcgggacgcaccctggaccgccagcagcagtgagaaggctcctgacatgagcagctctgaggaatttcccagctttgggggctcaggtggctcccaagaccctcccttggggccccaaacgataatgatcaaaaagaacagaaccctctccagcctgctgacccaaacccaaccacacaatggtttgtctcaatctgacccagcggctggaccctccgtaaattgttgacgctcttcccccttcccgaggtcccgcagggagccagttgtccaggagaatggggacgaagctggggaggggagagaggctaaagattgtgaccccggctctccaaggaggtgtgacatcatcatcatctctggccggaaagaaaagtgtgaggctgccaaggaagctctggaggcattggttcctgtcaccattgaagtagaggtgccctttgaccttcaccgttacgttattgggcagaaaggaagtgggatccgcaagatgatggatgagtttgaggtgaacatacatgtcccggcacctgagctgcagtctgacatcatcgccatcacgggcctcgctgcaaatttggaccgggccaaggctggactgctggagcgtgtgaaggagctacaggccgagcaggaggaccgggctttaaggagttttaagctgagtgtcactgtagaccccaaattaccatcacagggtacgaaaagaacacagaagctgccagggatgctatactgagaattgtgggtgaacttgagcagatggtttctgaggacgtcccgctggaccaccgcgttcacgcccgcatcattggtgcccgcggcaaagccattcgcaaaatcatggacgaattcaaggtggacattcgcttcccacagagcggagccccagaccccaactgcgtcactgtgacggggctcccagagaatgtggaggaagccatcgaccacatcctcaatctggaggaggaatacctagctgacgtggtggacagtgaggcgctgcaggtatacatgaaacccccagcacacgaagaggccaaggcaccttccagaggctttgtggtgcgggacgcaccctgggaccgccagcagcagtgagaaggctcctgacatgagcagctctgaggaatttcccagctttggggctcaggtggctcccaagaccctcccttggggccccaaacgataatgatcaaaaagaacagaaccctctccagcctgctgacccaaacccaaccacacaatggtttgtctcaatctgacccagcggctggaccctccgtaaattgttgacgtct

SEQ ID NO: 419 - DNA, 3147 bp, Homo sapiens
  misc_feature: Incyte ID No: 235169.27
ggggtaacaagatggcgaccgagacggtggagctccataagctaaagagcacttcttaaccttttggaggtcacagatatctttgaaactctgatgaaagcttgccgaactaaagcaagaatgtcttgctcgtggtttggagaccaagggaataaagcaagatcttatccacagactccaggcatatcttgaagaacatgctgaagaggaggcaaatgaagaagatgtactgggagatgaaacagaggaagaagaaacaaagcccattgagctccctgtcaaagaggaagaaccccctgaaaaaactgttgatgtggcagcagagaagaaagtggtgaaaattacatctgaaataccacagactgagagaatgcagaagagggctgaacgattcaatgtacctgtgagcttggagagtaagaaagctgctcgggcagctaggtttgggatttcttcagttccaacaaaaggtctgtcatctgataacaaacctatggttaacttggataagctgaaggaaagagctcaaagatttggtttgaatgtctcttcaatctccagaaagtctgaagatgatgagaaactgaaaaagaggaaggagcgatttgggattgtcacaagttcagctggaactggaaccacagaggatacagaggcaaagaagaggaaaagagcagagcgctttgggattgcctgatgaaaagttcctgatactttctgttctccagtgttttccatttctctccttcttcttggtcacatatatgcctaaatgcacagtcatgtgcctacgtcctgcctcgcaatgagggagcatgtaccccaggttcaagtgctggattgtgtcatgtgaccatcccaaaactcagagcaccctatggccgtctttgccctctgtcacataacttgaaaactgcctgatggcctttttgcagtggttccctccaggaagccttgatctcagttgaagaagttctttcctggcattccaatgcccctgtcagctccatactcctcagacacccttaacaaaggctgtcatgcacacaatgtgacaaatacacaaaataaatgataattacactaataatgatatgttcagaggggcactggccaggtccacacacatcataaggtgggagggggtgctaactcccactgggttgctgagctgtgccccccaagtcccttcactctgtgcctctttgggggtagggaggaacaggggaatgagacttcagctcacagatttatgttcataagagaaagacccctgccccccccccacccaccacacacacacaaaggtctttatttggtggtatttaaggagctgtattctaagtgtcccccatatttaatgccccagctctctagaatctgtagagggaagatacctgatgcttattgcccaatccctactctgccaagatcacgaggcatttgaccttggagggaggtatctgttcttcacttctctgttcctttccttccaccaaggaaatgtgagtggtgttgatggccgggtgtgtcttgtccttcaggattggggcagaaggaaggatgaagaacagggccagagaggcttggggttagcatagctgctatatgggtgaaggcaagctgaagagcctaacagccctgcccattcctctactgaaagatcttgtttcactttctcactataagaataggaataagatgttaaagctcaccaacatcaccttctcaagggtggtcacatacctttgccccttccaccaactggccaagggggagagtcatgctcttgggaagaatgagccatccagttttgctcaccagcttgggctttactttagttcagtactgtttttatcagacccgtaactgctggctctacttagagtgacagttttgctgaagattcttacccccacctctcctgacatcctctaagctcttgcctggagccaagaggcctggtggtgaagtaaggatagggtgtggatcaggagattctcaactccttggcttctaggcactgtccagctgggaggcagaggggaacttgtactctgaagcctgtgactcctcttaagcctcacatctcttcaccactactctggtgccctggttatctgtcccacagcgagaggtattttatgtccataaagtgcccgtggtaagtgctcagaattcatctcttggctgtggcgggtgctgtcatttctcattccattgaggggaagaaactgaggcacagtgagtccagaggagaatgggtcagggttgtgggaggaatgaatgggcctagctagtgacttgaaatggcaaccagtctctgcctgcttcctagccttccaagcccgggagtctccatccttcccatcctctgttctaactggccttgtcagatgcttttccccactgtactttcccctccctgctgccaggtactgttagattccaaaaataaaaggaaaaaataattatacactctgcttccttgttctcccctcttccaccctgagctttggggttaggagacttaaaatgtcccccttccagaatccttcccaccttggtctgctggctctattccctagcccagaccagtgatttggattcaaatgcccctgtaaccttcagcctccttactgctcctttcttgacctctcctaacgctttccagacccaggggactctggggtctctatactctctctaattgacctgaagatagaggctgggagcagggccattccagaggctctttggtctctctcttggctgagggaatttgggcataagcaggctgcaccctctggctaaataactcagcatcatgagggtggacctgagggtttaaagtagctctcattatatagatcctggatgttgagggttctctctcccacccccgcatccccagctcttaaaccctaacctcttactatttccatgacaactggcttcaattcaagccatttggctcagaaaaggttgagttagggtgatgatgggttagaaactaaacttcatgtgtccgccctcttgccctttactcccattcccaaccctggaggctttatacaagtgcttaagtgagtaggtgttggggagagcagggtttggggaataagggataaacggggcacagtggca

SEQ ID NO: 420 - DNA, 4605 bp, Homo sapiens
  misc_feature: Incyte ID No: 238854.22
cctggggcagcctcaccctgggcgcccacaccccagccctgggagagcgctactccgcctcccgcaccaccgaaaacctcctcctcctttacgggccgcgcctcctttacgggccgcgccccctttatacgcggacgcgccctcttttggtcgccccctccccaacccagcactaaggagcaccctgctctggtctccgccaccacccagcgcctcctggacccatccccccaaacccttgaacgtcctcaggacccccaggagcaggagacgcggagctcggagcgctgagctgacctgccggagccgggcgtgggctgcagcctcggagctccccggaacgatggtgaagttggggaacaatttcgcagagaagggcaccaagcagccgctgctggaggatggcttcgacaccattcccctgatgacgcccctcgatgtcaatcagctgcagttcccgcccccggataaggtggtcgtgaaaactaagaccgagtatgaacctgaccgcaagaaagggaaagcacgtcctccccaaattgctgagttcaccgtcagcatcacggagggtgtcaccgagaggtttaaggtctccgtgttggtcctcttcgccctggccttcctcacctgcgtcgtcttcctggttgtctacaaggtgtacaagtatgaccgcgcctgccccgatgggttcgtcctcaagaacacccagtgcatcccagaaggcttggagagctactacgcggagcaagactccagtgcccgggagaaattttacacagtcataaaccactacaacctggccaagcagagcatcacgcgctccgtatcgccctggatgtcagttctgtcagaagagaagctgtccgagcaggagactgaagcggctgagaagtcagcttagcgggatgggcaagttccttacaatgtgtcacttgcaaataacaaagggactttgagggacatttcattaaatataattactgatactttagaggttactcatttacggtgcaattgcttctgtttgctaatgctgctttgcaaataaaacttgctgccgaccacccacgggcataaaatcaagtgcatttcagcattgcctaaagagctctgacaccacttttcatgttaagatcttcatttagctcctttactgggatttattggatgctgtaaaaaaataaatttacactggatatgcgaagggtttggatctcagataaatgcattttgtggaattgattttctgaaccgaccctgctgtctgcaaaccttcctccatagccatatctagagtgatctctcgctgtgctaagagcaagcctacttcgcatttcttcctcggccatcagcgggtaacagtgctgactgctgccaaggtgcactgtagtaagtaagtggcatagagaacgaggaaaaagacccccccacccctccctgtgctgactcctgagtcggggtgggacggccctgcaatgtggcaggctcggtgtggattgactactccctcccctctgactctggcatcttggtaaggagggaggggcaccacccatctgggtggagacagctggggtttgctccagtgtgtgtagactggcagagcatgtgagggagagggctgggaagagacggccctgggcccgtgaggtgcagaactctccctgcaggtagtctgtctgctctgtgatgtgctgataggaaagagcccccactggccctctggttcacttctattatgaataaatttgcaccaatagccccattagtttttaaagaaatgagctgggtgggaaaagtggaaatgtaatttctggtaagcttgagctactttaatttttattctatgaaactgatatcccttgatgtgggaaacaggcaggaaaggctgtggggtgggggtgggggactggtgtggcaccgtgcaaacaaaatgacaaatttcaactcacaatctttgtaagaaaattgttccagtttgaatcttgatattaaagtttatgtttacaaaactgccagttagatgaactaaaagtgtgtaaaacaaatagaaaagacattcgcagacatttcttctatgttattgaatgtgttgtttctggtgtacgtgtcaaaagtttcagttttttagatcagaaataaacgacaaatagtgtgagatgtgttgtgaacaggcatggtgaccgtggtcagcgccactcttgtttcctgaaatgtgcttctaagacagaaaatgtattttctcatcaagggtgtctggagacacagaccgtgaccttggcgcagcggtgtgcatcagaggcgtgtgctgagaagggtggtgttaagctgtggaaaatgactcaagagcaataaatcagtgccaaagcttccctgcgcatctgaatagacacaagtgaagcccgtgtgcgcacagtgcagaggccgagcctgtatttccaggtagacgtggactttattgactgtgaattcatttacatgtaacttctgacatttcactctgtgcaaataaagaacatgaggatacctgtgctgcccagtggactgtctgtacacacacgcatttcaccaggcgcagtgcagactgtctcatgcccatgtgggcgctgggatgcttcctgtacagatgtctcatgccttcagttacacataggtgttcctgtttacagttcctggaggtcagaagcacaggcacgagagaagcaggcccgttcttccgtggcccacttcttcctttgaacaaaggctccttggacccagtggcgggaaactggccctcccacaccccctgcctgctctgggggcagcagtctttggaggagtaataatgccaggcagcccctcactgagggccccagtctcccctgcatttcttccctgattgattgataggaggtggctgggctgccactgaatttgtcaacttagactcattgacaacacattaaggggctgtaattatatttattagattaacaaggcagatgtgaattttctcttctataatccagtaagtctgtgtattcgttgactcagacagacaagaagccacaaggaaacaaagaagtaatcatttgttgagagacgttattaactatgatcttccctgaagctaccgggatgggaaaggtcagtgtcttcctttgaaccctgagacaattaggggctcttgaggcctgctgtgcccctgctgccaaggcagcctcaagttcaaggagcagctaatcacccactcctgcattcagtctgtcttgcctgatgagggctacgcaggctgcctcccattggtgtgcactgtttcctttttcagctgctaaatggctgaacaccatcggcctggggtatccctttttggggaatacgtctgtctgtctgaactcctttcccttcaaatggcactgtgataaaatctggtcataccatgctccagcactggaagtacatgaaagcacgcagtctgtgagtgcccatgaggactctcgtgctgggcccccgtggccctggctagctgtcgtaccagtcgaggaagagcaaggagaaggagcacatcacgaggaagaagaggatccacacgcggaagccagcgttgtttttaatggcctctcttatgtcttcgttgccttccttgatattttcagttgcccccacaactaactggtgaatgctgtcaatctcagcttcctgttgcaaaaccttttccgtgaatatctcttggagtctggaaatctcaaccactctcccttcgatttgcctcacttcatcaaacaagctgttcatttcaccaattagtcgctgattttcctgttcaaacatttgtatttcttctggggataactcatcttcgcctttgccatctccccacgttcccaattcaggttgtgtttcagccaaaattttttctggacgttcttcagtggcagggttttcttcagagtcttttgaaggactctgtgaaactttctcagaagatgtggattctcttgtctttgtatttggttctggttccagcttagataatcttttcttatccaccactcttttaactcggatggctctctgttctgagtaaagtttacatactcttttcaagtaatcttcaatgaaatccaaaacagcggtcctgtgctccttcacttgctgggaatgtatctccttgtgagcttctgttcgtagttgctgaattgcttctgaacaggtcctcatgaatatctgggcatcctggtctatctggtctcgttctgtgtctgtcatcctcccatattcagacatggtatggctataagcattaatataatctttcctgtgttccagaagaaaatctctcagtttgccaatgtgagaaatcacttcgcgggcccggctggagaagtcgcccttgggccgggggctccggcggaacagctcgtcccggctgccatcgaccccgccgcccaccgccactcccagcgccttgttccgcgtcttcacggtcttgacgctggcccggaatagcagcgtgatgtccaccgccatagcgacccgcaccctcagccccacactaggcccgcccacgtaagcagccggcgaccgcggcgcgaacccggccgctgaaggactggtcctgcc

SEQ ID NO: 421 - DNA, 401 bp, Homo sapiens
  misc_feature: Incyte ID No: 967709.1
gagggcgcggggccctatgtagacttggatgaggctggaggtagcaccgggctcctgatggacttggcagccaatgaaaaggcagttcatgcggacttttttaacgattttgaagatctctttgatgatgatgatgtccagtgaggccgtcgggtcatatatgctccatgtctgtgatgtgtctggagtctccggggacaggatcacctgatggtagacacgtgtgactatcactaggtatcaagacctagtcagccaataggggaactgcctgaaccaactgggtactgatgcctctgggaacgccagccccatgtccttgtttaaattaataaagagcactagaaccacagggtggttttaattcctgtgcttttagatgcagatggaccccccccccc

SEQ ID NO: 422 - DNA, 1000 bp, Homo sapiens
  misc_feature: Incyte ID No: 071944.2
  unsure 744, 748, 759, 763, 766: a, t, c, g, or other
tcaaaatacttttttccttagctgattttatcgagtggctatgtgcctaagggagtgttctaagcagacgttagttaggacccagaacgtgggaagtactggtttccagatcaatttggtggtgatcgtaaaccgattcaaatctctaaatcccaattgcacgccgacgttacggaaccaaaaacgctgacgcccacatttctgggcggacgcacaagtatgttacgatggctcgattgcttttgcctagcggaaaccattcactaaggaccgagcaccaaataaccaaggaaaaggaagtgagttaaggacgtactcgtcttggtgagagcgtgagctgctgagatttgggagtctgcgctaggcccgcttggagttctgagccgatggaagagttcactcatgtttgcacccgcggtgatgcgtgcttttcgcaagaacaagactctcggctatggagtccccatgttgttgctgattgttggaggttcttttggtcttcgtgagttttctcaaatccgatatgatgctgtgaagagtaaaatggatcctgagcttgaaaaaaaactgaaagagaataaaatatctttagagtcggaatatgagaaaatcaaagactccaagtttgatgactggaagaatattcgaggacccaggccttgggaagatcctgacctcctccaaggaagaaatccagaaagccttaagactaagacaacttgactctgctgattctttttcccntttnttttttttttngatnagnatactattaactggacttcctaatatatacttctatcaagtggaaaggaaattccaggcccatggaaacttggatatgggtaatttgatgacaaataatcttcactaaaggtcatgtacaggtttttatacttcccagctattccatctgtggatgaaagtaacaatgttggccacgtatattttacaccttcgaaataaaaaatgggatactgctccaaaaaaagagtccgta

SEQ ID NO: 423 - DNA, 1571 bp, Homo sapiens
  misc_feature: Incyte ID No: 332413.6
gaggactgtatagagcctgggaggtggaggctagcagtgaagctgtgattgcagtaccagcctggatagacacattgagaccctgtctctaaaaaagaaggaagcccagcgttcccttctctctccacttcctgtccccattgctgtccctggagtacgggcagcacaggtgaaggcgagggggacagacagacagcctgcccctccgtctcccgtggccctgcagcccaccctatctgctccaggttctgaagaaggccttccaggccacgctcaggtggctcctgagctcacccaagacccccggctgctctgatctcggccccctcatcccgcagttcctcagagagctgttccctgtgctgcagaaacgcctgtgccacccctgctgggaggtgagggactccgccctcgagttcctgacccagctgagcaggcactggggaggacaggctgacttcagatgcgcactcttggcttcagaggtgcctcagctggccctgcagctcctccaggaccctgagagttatgtccgagcgagtgcagtgaccgccatggggcagctgtccagccagggcctgcacgcccccaccagccctgagcatgcagaggcccggcagagcctgttcctggagctcctgcacatcctctccgtagactcggagggcttcccacggcgggcggtcatgcaagtcttcactgagtggctgcgggacggccacgccgacgcggcccaggacacggagcagttcgtggccactgtgctgcaggcggcgagccgagacctggactgggaggtccgcgcccagggcctggagctggccctcgtgttcctgggccagactttggggccgccgcgtacccactgcccctatgccgtggccctacccgaggtggccccagcccagccactcaccgaggcactgagggctctctgccacgtggggctctttgacttcgccttttgtgccttgtttgactgcgaccgccctgtggcgcagaagtcttgtgacctccttctcttcctgagggacaagattgcttcctacagcagcctgcgggaggccaggggcagccccaacactgcctccgcagaggccaccctgccgaggtggcgggcgggtgagcaggcccagcccccaggggaccaggagcctgaggctgtgctggccatgctcaggtccctagacctggagggcctgcggagcacgctggccgagagcagcgaccacgtggagaagagtccccagtccctcctgcaggacatgctggccacgggaggcttcctgcagggggacgaggccgactgctactgagcagaaccagagtctgccactggggctcaggaccaagggaggcagcaccatgtccttctgtgggacactgccagccccagggctccagcccagcccggtggatcctctggggaagccaggaccaggagagaagcaaggtcaagaaatcccacagtttgatgtattaaagaaatgacttatttctactcaaaataaatggcattgaagtctttctttaaccctttatgagttaatttaataataatgatctgagac

SEQ ID NO: 424 - DNA, 6115 bp, Homo sapiens
  misc_feature: Incyte ID No: 330897.2
  unsure 2444-2601: a, t, c, g, or other
agcgagccggggctacggggcgagcgcggggtgcggtggtcggcggggaggcccccgcgctttaaaataatgcccgcggcgcccgcgcgaccatgcaatggcgagcgctcgtcctggggctggtgctcctccggcttggcctccatggagtattgtggctcgtcttcgggctggggcccagcatgggcttctaccagcgctttccgctcagcttcggcttccagcgtctgaggagccccgacggccccgcgtcgcccacctcggggcccgtgggccggcctgggggggtatccgggccgtcgtggctgcagccgccggggaccggggcagcgcagagcccgcgcaaggctccgcggcgtcctgggccggggatgtgcggcccagccaactggggctacgtgctgggcggccggggccgcggcccggacgagtacgagaagcgctacagcggcgccttccctccgcagctgcgtgcccagatgcgcgacctggcacggggcatgttcgtctttggctacgacaactacatggctcacgccttcccccaggacgagctcaaccccatccactgccgcggccgtgggcccgaccgcggggacccttcaaatctgaacatcaatgatgtactagggaactactcattgactcttgttgatgcattggatacacttgcaataatgggaaattcatccgagttccagaaagcagtcaagttagtgatcaacacagtttcatttgacaaagattccaccgtccaagtctttgaggccacgataagggtcctgggaagcctcctttctgctcacagaataataactgactccaagcagccctttggtgacatgacaattaaggactatgataatgagttgttatacatggcccatgacctggcggtgcggctcctccctgcttttgaaaacaccaagacagggattccatatcctcgggtgaatctaaagacaggagttcctcctgacaccaataatgagacatgcacagcgggagccggttccctcctggtggaatttgggattctgagtcgactcctgggggactccacatttgagtgggtggccagacgagcagtgaaagccctttggaacctccggagcaatgatacaggattactaggcaatgtcgtgaacattcagacgggccactgggttggaaagcagagtggcctgggtgccgggctggactccttctatgaatacctcttgaaatcttacattctctttggagaaaaagaagacctagaaatgtttaatgctgcatatcagagtattcagaactacttaagaagagggcgggaagcctgcaatgaaggagaaggagaccctccactctatgtcaacgtgaacatgttcagtgggcagctgatgaacacctggattgactctctgcaggcctttttccctggactgcaggtgctgataggagatgtggaagatgccatctgccttcatgccttctactatgccatatggaaacgatatggtgccctccctgagagatataactggcagctgcaggcccctgacgttctcttctacccactgagaccagagttagtggaatccacatatctcctctaccaggcaaccaagaatcccttctacctccatgtaggaatggatattctgcagagtctggaaaagtacacaaaagtcaagtgtgggtacgccacgctgcatcacgtcattgacaagtccacagaagaccggatggagagcttctttctcagtgagacctgtaaatatttgtatctgctgtttgatgaagacaatccagtacacaagtctggaaccagatacatgttcacaacagagggacacattgtatctgtggatgagcatcttcgggaattgctatggaaggaattcttctctgaagagggagggcaggaccaagggggaaagtctgtgcacaggccgaaacctcatgagttaaaagtcatcaactccagctccaactgcaatcgtgtacctgatgagaggaggtactccctgcccttaaagagcatctacatgcgacagattgaccagatggttggtttgatttgatctgctctctgtgaggcctcatcttgaaccagaccttaacgaccaaacccagaccatgccaaagtccagtctgaaatgaaaggggacagaagtcttgctgtccatggtggtgtaggaatttctgtgcaacacctcaccacgtctggttaatccttgcacacttcagtgtttctctcctgttcaataaaatgccctgttaaggatataatttgaagtgagaagatacatggaaattgccctcttatgacatgttgatgttataagcacaatagatggggcatctttggattgatgttcacagctttatacttcagaacctaagtctcttcactttgctggcacctgctatactggagtattgctatgtctttaaaaaannnnnnnnnnnnnnnnnnnnnnnnnnnnnnnnnnnnnnnnnnnnnnnnnnnnnnnnnnnnnnnnnnnnnnnnnnnnnnnnnnnnnnnnnnnnnnnnnnnnnnnnnnnnnnnnnnnnnnnnnnnnnnnnnnnnnnnnnnnnnnnnnnnnnnnnnnnnnnttgagaatgaaatttctgcaaaagggcccatggttcatttggtatccctatttaattgcattgaaaatgtcatcctttctgttgttagataattggggtcttcccctgatatccaaccgtgattttggatcacatgggagaaaaagtcatccagtttttcatgtttgcctcaagtaatctttacagtgttacaaattatttgcttaagaagaatggtcttaaccagaattcttaacagatagtctcttaggttattatgttatggtctaagaggttaactgacatcttttggatggtattttgcattttgaatatgaacttacctgaggaactcccatagttccagaatcaggtgccttttagggagagaacaatacctaagattgtctgagcttccatctttctcatatttcctaagcaaggattctcacttctgaccatatttgggttagagttctgttttgtttctgttttctgtgtctagtgccaattagctaaatcagggagaaagaaatgatcacatgacttttagcatccttgagccatttctctgtgtaatacaggctttagattagtgccttatattggttttggtttggggcactggatgtcgcagctactgctatggtttcaggaggcctgtttagccacatggtgagaccgtggtgaaagggggatggaaattgcttggccagtctttgcctttcatcctgtaaaagtaagcatgtagaaggaggaagttgtgctaaaatgcctttgtttttttgttattattttcttagccagaacatctctctttgaactcacactgatacacacctgctactcttacacagtgcagcagggctgactcttagtctggcttccatgaagcgtcatgggtggaaacgcattctagtaaaaaaggtaggaaatccctaaaacttccagcctcacatagcacggttctcacctgtcactgttttcccacctctaaggatttcatgtacatcttttcaaagctagaaataagcactgtctaagtttatgttgcatttttagtcaaaagggagaaatcttattccttcttgaaaattttaagtgttatggttttatatagttcagttctttgagatttttgaaaagagtattttcagtaataaacgtgccatctctatctcttaaacatttattacaacaattgttttaaaatagaaaaaataaaatgcttctattttaccttttttcatttcagaagcattattctgtttattaacagtgtcccatctactgaatagaaaactttgagaataatatatatatatattttaaatgttttcactgactcattgaaaatgttaattacacacacatgcatgcatgcacacacgagcatacttgtacctttgtctctgggcaaacaggtgggactgttagtgacccatttgggaaaatagagcatctcagagaaggaggtgagttcttcctgcctgtgatttctcttggcgctcccctcctctcccgctctggcttctgtggcggcagtggtgggtaagcactccagtgttctcttaatgaggcactttgcctgtcactcgagcaagcctgggtgttccttcctcctcatgctcctggaatagggaatagggatctcatgcttgcaaactacacaatgctgcaggtgcttcccaggggccacaggctgtcaggaaacgtgttttatgttaagtcacaaacccacttgacttctgggtactggaattaataccagtgggtgagactgagggtgagtgagttagtacatattaatcctggttgttgagcttccagactaccccgtccaaagtttgatgctatgtagtcagtggtttgtggggctggatgccagaaggttctttgagccagtttcaaaggttacttgttttcttttttcttttttaaagtcagaatgttaacagctgtgatatatcctgcagggcttttgcagtttcttctgttctgtgttctgaaatcctgggtagagaatggctgaggaggagattaccagagaagttgctttgctcagtgctttgccccaggattgcctcaaatctgagtggacttcatcctttgcggcggctctgagcctgggcccatcttcctattcccacgtgtagctagtgtctagtgtcagctttgctcaatgtggtggaaacattttgcagaactgttgtagaaagctgccttatagttggcttgacaaagcataattctctcataacaaactttcaaatcattacagtagcttagctactttagttgatgtgaccgaggaatcccttctagaatcataggtggcaagggagggtttgctagctctccatttgcactggccattgtgaaaaaccagcttctgtattcaaatctttccttcatttttttaaattttttttttggcagcgcttgtgctggaacttactcattgtaactgaatcctcagggcttttcttgttttagatcatggactgtgcacgtgacacttaaataattttctatgtatttaaagaaaaatgcaccaggatggtgtctgtgcacgtgactattagaggagcgtctgtagaagtacctggtttggtcagtgcagttgtgcaatctgagggccttgtttcctcctcccctttccccttctccccaccaaaggaaaatatccctcttaatgatttcgtagttcagtttactgaatgattaccacctgtaattcctctttggattgtgtagactcaacatgagacattcctttctgctttctggagggcaccaggggcctttctctttgataaattttttttgtctgttgacaaaaacaaaaatcttttttcaaatgtagtgctggtgaaaaggtagggctgagtgattaccttagccacagggtggctgagcaggaactttagaagaaaatcctgagctttcctgtccattcccagcatccagctcctattctagtgcctcttccctgcagggcagggaccccttgggaaatcgaggaggtgggacgggctgggccctgtgtcccaggtttcacagggctcagggttatgctcccgcttgaatctggacgtgaatctggtaaaaatatcaagtacctgtggaactccctgattctataccctcttccttctttctgcaaggcagaggaataatatttttaaaggttattttgttttagttttaaatagcaaaacacaagctgcatttttatttattttgcataagaaaggtaaatctttttacaaaaaaaagtatagagttggaaactctgggaaaacttacggaaatacacaaatgcttctctgtaatgtgcaatatgctttgcaactgtagatgatattttatgtttaatctgtaaataagaaatgtatttaaattaaaagggatctttttgtaaaaggaccaaatgttcttttataaatgtaataaggaatatcttgctctttaaaatttattaggatttttatgagtaatttttattaaaagatttctttttttgagttgtaaa

SEQ ID NO: 425 - DNA, 1717 bp, Homo sapiens
  misc_feature: Incyte ID No: 991612.1
gacgcgtgggggcggagcaagagcaaagaaaaatccctttggttccagaaaatctcctgaaaaagaggaaggcttatcaagccctcaaagccacccaggcaaagcaggcacttttggcaaagaaggagcagaagaaaggaaaagggctcaggtttaagcgactggaatcattcctacatgattcctggcggcagaaacgtgacaaggtgcgtctcagacgactagaagtgaaacctcatgccttggaattgccagataaacattccttggcctttgttgtacgcatcgaaaggattgacggcgtgagtttactggtgcagagaaccattgcaagacttcgcctaaagaaaatttttagtggtgtctttgtaaaagtcaccccccagaatctaaaaatgctgcgtatagtggaaccttatgtgacctggggatttccaaatctgaagtctgtccgagaactcattttgaaacgtggacaagccaaggtcaagaataagaccatccctctgacagacaatacagtgattgaggagcacctggggaagtttggcgtcatttgcttggaagacctcattcatgaaattgccttcccagggaagcatttccaggagatctcatggttcttgtgccctttccacctctcagtggcccgtcatgctaccaaaaatagagtgggcttcctcaaggagatgggcacacctggctatcggggtgaacgcatcaatcagctcatccgtcagctgaactagacccaggtgaggcagggctgaaaactgcccttgggctgacttttgataggccatgccttgccactttacaagttctttttgcatttactagtatttaagagtaaccttgagattgggaggaatagaggaggctggtacaaatagatggagacctgctgggatcagtgaatgcctgattaggacatggggctatgcatagcctaagagttataggcgtgacaactgcgcccagctcttgtgtaccttatgtgaggaagtcctgctcaatcaggatcggtcacgcaggccctgatcttgctactctggttccatgtcctatggaagaccaaagtttaccaagatagatttttcccttcatagtggcagatagtgttaacccctgcaccatctgtaactcagaaatccccaccatttcttcccctgggcttcagaatagaattgcctggtttctctgatgatcagcatggttccttaaaacccaaatcagcaaggaatgaacaattttgtttggcatggatgaaattagcactgtttggctcgttaggccccaggcaggcaggcaccttaattttttccttgcatattctagtcttcagaagcattgccttttgtcctactggtagtgacatagaccaataacagggcatctggggattttaatcctgaaaacagtgagtctgatactgcttgtgtttttcatcagtgtccaccccaagtgggtcttcctgctattctcttcacttagttgcccctcacttgccatctgagcaattggcaaggatgtgccaggcctaggttaaacttggaaacatgcttgaccattctattccctggtcctttaagatcagtttggctgcaattttggctccttggaccctcaagcatagctggtaaatcaagttagagatgtaactgccttaaaacatgccagcttaggctgggcgcggtggctcacgcctgtagtctca

SEQ ID NO: 426 - DNA, 1156 bp, Homo sapiens
  misc_feature: Incyte ID No: 331609.14
ctcggtttggctgactggggagtcggcaggcggcaaggtctgcctgcgctccctgctctacaactcctttgggggcagtgacaccgctgttgatgctgcctttgagcctgtctactggctggtagacaacgtgatccgctggtttggagtggtgttcgtggtcctggtgatcgtgctgacaggctccattgtagctatcgcctacctgtgtgtcctgcctctcatcctccgaacctactcagtgccacgactctgctggcatttcttctatagccactggaatctgatcctgattgtcttccactactaccaggccatcaccactccgcctgggtacccaccccagggcaggaatgatatcgccaccgtctccatctgtaagaagtgcatttaccccaagccagcccgaacacaccactgcagcatctgcaacaggtgtgtgctgaagatggatcaccactgcccctggctaaacaattgtgtgggccactataaccatcggtacttcttctctttctgctttttcatgactctgggctgtgtctactgcagctatggaagttgggaccttttccgggaggcttatgctgccattgagaaaatgaaacagctcgacaagaacaaactacaggcggttgccaaccagacttatcaccagaccccaccacccaccttctcctttcgagaaaggatgactcacaagagtcttgtctacctctggttcctgtgcagttctgtggcacttgccctgggtgccctaactgtatggcatgctgttctcatcagtcgaggtgagactagcatcgaaaggcacatcaacaagaaggagagacgtcggctacaggccaagggcagagtatttaggaatccttacaactacggctgcttggacaactggaaggtattcctgggtgtggatacaggaaggcactggcttactcgggtgctcttaccttctagtcacttgccccatgggaatggaatgagctgggagccccctccctgggtgactgctcactcagcctctgtgatggcagtgtgagctggactgtgtcagccacgactcgagcactcattctgctccctatgttatttcaagggcctccaagggcagcttttctcagaatccttgatcaaaaagagccagtgggcctgc

SEQ ID NO: 427 - DNA, 2836 bp, Homo sapiens
  misc_feature: Incyte ID No: 234677.1
gcggaagcggaccagggccaggcttgtgttcgcagccttgccggggctggggttccgatgtggtccccggagcgggaggccgaggccccagccgggggagacccggcgggccttctgccccccgagtgggaggaggacgaggagcgcatgtccttcctgttctccgctttcaagaggagtcgcgaggtgaacagcaccgactgggacagcaagatgggcttctgggcgccgttggtgctgagccacagccgccgccagggggtggtgcgcctgcgtctgcgggacttgcaggaggcctttcagcgcaagggggagcgtcccgctggggctggccacggtgctgcaggacctgctgcgtcgaggggagctgcagcgggagtcagacttcatggccagtgtagacagcagctggatctcctggggggttggggtcttcctgctgaagcctctcaagtggactctttctaacatgctgggagataataaggttccagctgaggaggtccttgtcgctgtggagctgttgaaggaaaaggctgaggaggtgtatcgtctgtatcagaactcgcccctctcctcccaccccgtggtggccctgtcagagctcagcaccctctgtgctaactcctgcccagatgagaggaccttctacttggtgttgctgcagctgcagaaggagaagagggtcacagtcctcgagcagaacggggagaagattgtgaagtttgcccgagggccacgtgccaaggtctctccagtcaatgacgtagatgttggggtgtaccagctgatgcagagtgaacagcttctctcacgcaaagtggagtccttatcccaggaagcagagaggtgtaaagaagaagcccgccgggcatgccgagcaggaaagaagcagctggcactgaggtctctcaaggccaagcaacggacagagaagcgcatcgaggccttgcatgccaagctggacactgttcaaggcatcctggaccggatctatgcctcccagacagatcagatggtttttaacgcctaccaggctggggtaggagcactcaaactctccatgaaggatgtcacagtggagaaggcagagagcctcgtggatcagatccaagagctctgtgacacccaggatgaagtttctcagactctggctggtggggtaacaaatggcttagattttgacagtgaagaactggagaaggaattggacatcctccttcaggataccaccaaagaacctttggatctgcctgacaacccccgcaataggcattttaccaacagcgtgcctaaccctaggatctcagatgctgaacttgaagctgaacttgagaaactgtccttatcagagggaggtttggtcccaagcagtaaatctccaaaaaggcaattggaaccgactctaaagccattgtaggaccctcaagtgaaggaccctcatgtaaaagagagaccaggcctgctgggtgtgtacatagttatttaaacaagaaactctcagaatgtgtttggaagaggagaaaggagaaccactgattttatctggatgctactacttactacaggacagatagaatttctggaagcgatgctccaaaggcttgctcccagctgtatcatggacctgccttctcatctttatagtgccacgatttatacagtcctgtgtctgacctgtcatttcatagcctgcagttcttgccattggcacacttagatttgtcttcacccaccagcttcgttccagcccatgaaggggaaagatttgcagctttgccaaatctgaatcagttcccactcccccctgtggttttttagaggggtttatcctgtcgctaatgtcagttaaatagcttattcctgtcccacttgatttcactggtaagaatgagaatgaaatacttaaaggttttatttgaggggacttagctgccattttatggaaaaacatgtagtataaaaggtttttctccagggtcatttgacagaattctccaggtgttcagagaaagaggtcgccccaagtggcccagagtcgtgacagtccggaggggctggtgtggccggtgggcgctgcctcttcatctgatggagccaggaggtccgccggtgggggaaaggcttcttccgaggcttctgcactcgcctgggaagaggcccagtcactacaggaccctgagatgtccagaccccttatgcaaagaggcaaaattgttgccttggccccatcatggagtaacttaaaaatacatatctatcttccagaacaagccacacaacaacacacctcccctccttgagcctggcacacagcaccgggctctctgaatttggaaagtgtttcattttgtggcctactgctcggggcaggggggctgagccaggatgtgcaatagaagcaggggttgtcccctctgccagatctgtggggagctgcccaggccacccgtgcacctgtcctgcttcctgcagtccccactccctgcctcctttgagggactgggggactcggggtagggggacagacgggaaagggtctgaatgctctggcaatggcgagaagaagcgatcgccacactgccactctgctgcccagccaccaggatttctgcctggagccctttgccctgtccctgctgcctgaggtggcgtagagcagaggagaagaatttgctccaggccaggagcacaaatcgttgttcaatgaatttctctccaactcgaccttggtaaacggaaatgttgggggtgaagagaaacaatcactatttttttcttttttatctggtaaataattaaaagaaaaaccgaacacttaaaaaaaaaaaaatag

SEQ ID NO: 428 - DNA, 378 bp, Homo sapiens
  misc_feature: Incyte ID No: 1099747.1
gggggtgtcttccggtcgggccgagctagtggctgggtttgttgaaggacatcggctgcagagtttgtgattcggacgaagaagattgaagtcatggctggtccagaaagtgatggccaattccagttcactggtattaaaaaatatttcaactcttataccctcacaggtagaatgaattgtgtcctggccacatatggaggcattgctttgttggtcctatactttaagttaaggcctaaaaaaaccccagctgtgaaagcaacataaatggattttgaaatgtctggccttatctgttaagtcccacgcctgaagaagctgatgtgaactcatcatgtaatactcaatttgtacaataaattatgaacctggaaa

SEQ ID NO: 429 - DNA, 3858 bp, Homo sapiens
  misc_feature: Incyte ID No: 216242.2
gcggccgctctcagcggagggggcggccccggggcccaggcgccgcggcccggcaccccgtggaagagccgcgcgtacagcccgggcatccagggactacatgaggaaataattgacttttataacttcatgtccccttgtcctgaagaagcagctatgagaagagaggtggtgaaacggatcgaaactgtggtgaaagacctttggccgacggctgatgtacagatatttggcagctttagtacaggtctttatcttccaactagcgacatagacctggtgatcttcgggaaatgggagcgtcctcctttacagctgctggagcaacctctgcggaagcacaacgtggctgacccgtgttccatcaaagtccttgacaaggctacggtaccaataataaagctcacagatcaggagactgaagtgaaagttgacatcagctttaacatggagacgggcgtccgggcagcggagttcatcaagaattacatgaagaaatattcattgctgccttacttgattttagtattgaaacagttccttctgcagagggacctgaatgaagtttttacaggtggaattagctcatacagcctaattttaatggccattagctttctacagttgcatccaagaattgatgcccggagagctgatgaaaaccttggaatgcttcttgtagaattttttgaactctatgggagaaattttaattacttgaaaaccggtattagaatcaaagaaggaggtgcctatatcgccaaagaggagatcatgaaagccatgaccagcgggtacagaccgtcgatgctgtgcattgaggaccccctgctgccagggaatgacgttggccggagctcctatggcgccatgcaggtgaagcaggtcttcgattatgcctacatagtgctcagccatgccgtgtcaccgctggccaggtcctatccaaacagagacgccgaaagtactttaggaagaatcatcaaagtaactcaggaggtgattgactaccggaggtggatcaaagagaagtggggcagcaaagcccacccgtcgccaggcatggacagcaggatcaagatcaaagagcgaatagccacatgcaatggggagcagacgcagaaccgagagcccgagtctccctatggccagcgcttgactttgtcgctgtccagcccccagctcctgtcttcaggctcctcggcctcttctgtgtcttcactttctgggagtgacgttgattcagacacaccgccctgcacaacgcccagtgtttaccagttcagtctgcaagcgccagctcctctcatggccggcttacccaccgccttgccaatgcccagtggcaaacctcagcccaccacttccagaacactgatcatgacaaccaacaatcagaccaggtttactatacctccaccgaccctaggggttgctcctgttccttgcagacaagctggtgtagaaggaactgcgtctttgaaagccgtccaccacatgtcttccccggccattccctcagcgtcccccaacccgctctcgagccctcatctgtatcataagcagcacaacggcatgaaactgtccatgaagggctctcacggccacacccaaggcggcggctacagctctgtgggtagcggaggtgtgcggccccctgtgggcaacaggggacaccaccagtataaccgcaccggctggaggaggaaaaaacacacacacacacgggacagtctgcccgtgagcctcagcagataatggctcctggctgcgtcagcctcccccacccctctgcagactgccccgcggcctcggccaccggcaggggaaccgagaccagcaccccgcacgtcagccgggctcgcggcacgcccgccgctgatcactctgcatgtttcttcgtgtggtggtcgcgtccatcttcaagaacagctcgttgtgctcatctgtgaagccttattaaacgtggacgttgttttctgccttcccaggattcttccttcagtgctgaggcaggttgggctcaggaactgcagggacgtgaacatgcgcttgcggtttgaggtagccgtgtctgttccttcgcggtttgctattttcatttcctgttcgtcaaagcagcagaggagatcaaaccccgttcgtgtgtctttcctccacggataagcttgggaggtcattgttttactgccctcacattttgtttgaaatttcagaactgtttttctatgtaaatattgaaaacttatgatttgtgcaataactcagatattttttatttaatttcctattttcacataagttatatttaagggaggagggaattttttttaaacaagcttaggtcctttcccgagctgcattttctaagttgggtcatcgtgtcggctggttgtctgacgagcatcgttacaaacaccatgatgaggggtttggggttttattttgatgtcttttcttttggtcggaagtgagtgaaggagccaggtcgccctgaaggttttccaaagggcttggctccagagccacctggcagactgcccgtggccctgctgtcgggccccaggccgttgtcctgctctgaccacagagttttaatgttttggttttcacttcttttaaactggacaacaaatccagcatttcaagtgccagaagtataactttctaaggagagaagggttgtcacattataaaatctttaggaaaatgtgaactggaaaacgcttcggtcagttttagtgacatagcctgtgatgatgggtctggtgactattattgcggaccgtggtacccagttttaggaatgtggagaaaggaattctgttgattccgttgaggaatctgtagcgtatgcattcgttctgttaagagcaaatctaggagaagtgcttcagctgcccagtgcgccgtggggagtgttttaacggatcgtgtcgcaggagagcacagcccagcgttggggccgggaccgctggcgcccgacgtcggaagcatacaggtatactatgcaagtgtattctgccacaacaaccactgtctttgttacctttttttgaacaagaatatatccatcctgcctaaccctgagtttttggagcaccacagttgtcctgggagttggttgcatcttgtaggccatctgacttcctgtttttaaaacgggggtctggtcttgctaaacactacaggtaggttggtctttgaagtccactagtggagaatgtcaagacaagatacttattaccatgacatctgatgcatgtgcagcagtggggagttctagattgatctctgaatgtgatcgacgcccagcaaggacaagctttaaaatgtctgcggtctgcccttttgaagcaggactggctcactctgtcattgggagctgtcagctgcgactgcaggttctctaggaggcattccagaatagagtagcacactgtgtctgcagttctcgatgaccgaaagttatcaaaaatatttaaaatatttaaattgtgaacctattgataaagaatatttataaaaactgatctgtaggcctgtactaatctctacgcattagcaatattgactgtaaacccacattaaggaaaccactacgggtctggcagtgcgtgtcccgtggggtgtgcattttaaaactcgattcatagacacaggtaccatgttccatttccgtcatggtgaagcaaatgaattggcctggctaccactgtggtcgcgtgctacaggtttgacaaaaagatatcatgtttcgatttttttgtgtgtggacaacaatatggaagctaaaattgacatatttttatgtaaagtttttctattctttgatttttaataaactttggaaaccag

SEQ ID NO: 430 - DNA, 357 bp, Homo sapiens
  misc_feature: Incyte ID No: 174274.1
  unsure 24, 324: a, t, c, g, or other
cccctaggtggacagagccaaagnctcaacacgcacaaacatctgcatacacacctcaaaatggaagcctcgttgccttgccttgatcataagttcttgctaccccaccattcccagaaataaccgctattcctaagtttcacagttcttttgcctgttgttttagtgtttactgcctctgtatgctcaggccatatatgctgttttatctgatgtaaatggactcatacagcttgcgtcctgtggctacacctttgttaacaatacatttgcagtttgtctacactgatgcgcgtggcagctccgtgccgaattcggagaganaaacaatttagcctatttattcaaccaatggca

SEQ ID NO: 431 - DNA, 2595 bp, Homo sapiens
  misc_feature: Incyte ID No: 234758.1
gcggcgggccgccggggtgagcgtgccgaggcggctgtggcgcaggcttccagcccccaccatgccgtggcccctgctgctgctgctggccgtgagtggggcccagacaacccggccatgcttccccgggtgccaatgcgaggtggagaccttcggccttttcgacagcttcagcctgactcgggtggattgtagcggcctgggcccccacatcatgccggtgcccatccctctggacacagcccacttggacctgtcctccaaccggctggagatggtgaatgagtcagtgttggcggggccgggctacacgacgttggctggcctggatctcagccacaacctgctcaccagcatctcacccactgccttctcccgccttcgctacctggagtcgcttgacctcagccacaatggcctgacagccctgccagccgagagcttcaccagctcacccctgagcgacgtgaaccttagccacaaccagctccgggaggtctcagtgtctgccttcacgacgcacagtcagggccgggcactacacgtggacctctcccacaacctcattcaccgcctcgtgccccaccccacgagggccggcctgcctgcgcccaccattcagagcctgaacctggcctggaaccggctccatgccgtgcccaacctccgagacttgcccctgcgctacctgagcctggatgggaaccctctagctgtcattggtccgggtgccttcgcggggctgggaggccttacacacctgtctctggccagcctgcagaggctccctgagctggcgcccagtggcttccgtgagctaccgggcctgcaggtcctggacctgtcgggcaaccccaagcttaactgggcaggagctgaggtgttttcaggcctgagctccctgcaggagctggacctttcgggcaccaacctggtgcccctgcctgaggcgctgctcctccacctcccggcactgcagagcgtcagcgtgggccaggatgtgcggtgccggcgcctggtgcgggagggcacctacccccggaggcctggctccagccccaaggtggccctgcactgcgtagacacccgggattctgctgccaggggccccaccatcttgtgacaaatggtgtggcccagggccacataacagactgctgtcctgggctgcctcaggtcccgagtaacttatgttcaatgtgccaacaccagtggggagcccgcaggcctatgtggcagcgtcaccacaggagttgtgggcctaggagaggctttggacctgggagccacacctaggagcaaagtctcacccctttgtctacgttgcttccccaaaccatgagcagagggacttcgatgccaaaccagactcgggtcccctcctgcttcccttccccacttatcccccaagtgccttccctcatgcctgggccggcctgacccgcaatgggcagagggtgggtgggaccccctgctgcagggcagagttcaggtccactgggctgagtgtccccttgggcccatggcccagtcactcaggggcgagtttcttttctaacatagccctttctttgccatgaggccatgaggcccgcttcatccttttctatttccctagaaccttaatggtagaaggaattgcaaagaatcaagtccacccttctcatgtgacagatggggaaactgaggccttgagaaggaaaaaggctaatctaagttcctgcgggcagtggcatgactggagcacagcctcctgcctcccagcccggacccaatgcactttcttgtctcctctaataagccccaccctccccgcctgggctccccttgctgcccttgcctgttccccattagcacaggagtagcagcagcaggacaggcaagagcctcacaagtgggactctgggcctctgaccagctgtgcggcatgggctaagtcactctgcccttcggagcctctggaagcttagggcacattggttccagcctagccagtttctcaccctgggttggggtcccccagcatccagactggaaacctacccattttcccctgagcatcctctagatgctgccccaaggagttgctgcagttctggagcctcatctggctgggatctccaaggggcctcctggattcagtccccactggccctgagcacgacagcccttcttaccctcccaggaatgccgtgaaaggagacaaggtctgcccgacccatgtctatgctctacccccagggcagcatctcagcttccgaaccctgggctgtttccttagtcttcattttataaaagttgttgcctttttaacggagtgtcactttcaaccggcctcccctacccctgctggccggggatggagacatgtcatttgtaaaagcagaaaaaggttgcatttgttcacttttgtaatattgtcctgggcctgtgttggggtgttgggggaagctgggcatcagtggccacatgggcatcaggggctggccccacagagaccccacagggcagtgagctctgtcttcccccacctgcctagcccatcatctatctaaccggtccttgatttaataaacactataaaaagttaaaaaa

SEQ ID NO: 432 - DNA, 1199 bp, Homo sapiens
  misc_feature: Incyte ID No: 407217.1
cattgatcagaaggtgtatcaggctgaggtggataatcttcctgtagcctttgaagatggttctatcaatggaggtgaccgacctgggggatccagtttgtcgattcaaactgctaaccctgggaaccatgtggagatccaagctgcctacattggcacaactataatcattcggcagacagctgggcagctctccttctccatcaaggtagcagaggatgtggccatggccttctcagctgaacaggacctgcagctctgtgttggggggtgccctccaagtcagcgactctctcgatcagagcgcaatcgtcggggagctataaccattgatactgccagacggctgtgcaaggaagggcttccagtggaagatgcttacttccattcctgtgtctttgatgttttaatttctggtgatcccaactttaccgtggcagctcaggcagcactggaggatgcccgagccttcctgccagacttagagaagctgcatctcttcccctcagatgctggggttcctctttcctcagcaaccctcttagctccactcctttctgggctctttgttctgtggctttgcattcagtaaggggaccatcagtcccattactagtttggaaatgatttggagatacagattggcatagaagaatgtaaagaatcattaaaggaagcagggcctaggagacacgtgaaacaatgacattatccagagtcagatgaggctgcagtccagggttgaaattatcacagaataaggattctgggcaaggttactgcattccggatctctgtggggctcttcaccaatttttccagcctcatttatagtaaacaaattgttctaatccatttactgcagatttcacccttataagtttagaggtcatgaaggttttaatgatcagtaaagatttaagggttgagatttttaagaggcaagagctgaaagcagaagacatgatcattagccataagaaactcaaaggaggaagacataattagggaaagaagtctatttgatgaatatgtgtgtgtaaggtatgttctgctttcttgattcaaaaatgaagcaggcattgtctagctcttaggtgaagggagtctctgcttttgaagaatggcacaggtaggacagaagtatcatccctacccccctaactaatctgttattaaagctacaaattcttcacacc

SEQ ID NO: 433 - DNA, 847 bp, Homo sapiens
  misc_feature: Incyte ID No: 246916.11
gtccgagggctgtgtcagaaggctgggcagccatggcgtcctatttcgatgaacacgactgcgagccgtcggaccctgagcaggagacgcgaaccaacatgctgctggagctcgcaaggtcacttttcaataggatggactttgaagacttggggttggtagtagattgggaccaccacctgcctccaccagctgccaagactgtggttgagaacctccccaggacagtcatcagaggctctcaggctgagctcaagtgccccgtgtgtcttttggaatttgaggaggaggagactgccattgagatgccttgccatcaccttttccattccagctgcattctgccctggctaagcaagacaaattcctgtcccttgtgccgctatgagctgcccactgatgacgacacttatgaggagcacagacgagataaggctcgaaaacagcagcagcaacaccgactggagaacctccatggagccatgtacacgtgaggaggttggggctgagtgctggccctctgcgtcttccttattaaccttgaatcctcattaaaggtttctttacccaccctgaggctgtattgatcacagacctggccaggggctctgcatcctccatcaggtctctacttctgttggggaaggtgatcctaaatcgcagaaggcaccaggctgcggttttcctccctgctggcccatctggactcatggcagtggtaaagaactggattactgcaatagccagggcttgggcctatgtgttcatggttggaaggcaaaatgtgtcagggtctggtacccagttaattacttaaagctgataaactaggctgggtgcagtggct

SEQ ID NO: 434 - DNA, 581 bp, Homo sapiens
  misc_feature: Incyte ID No: 246916.15
tccattccagcgcattctaccctggctaagcaagtactgcttctcttcttctagctctcaccctgccctgggcccagtactcaagcttctttctgttcatggactgctgggggatggaagaagagtggcagttgggagcaggggagggtggttatcagcttatgaagatcagaccaaggctagaacactactctacttttctcagacaaattcctgtcccttgtgccgctatgagctgcccacctgatgacgacacttatgaggagcacagacgagataaggtaggggctgatgcttaagtggaggggtcgtaatgggctccctgagtcctgtccccgctgccatcacttcccacctcagcaggactgggtaggcctcagaatccctggctctggctgtcttcttagtgactttgatttgtggtgagagcctcagcaatgcagacgccagaggcctgaaaacagagccagccccataatagctgcccatcccctcacccataggccttcagttttggcccctgcccagcatgccttctttccttcaggctcgaaaacagcagcagcaacaccgactggaga

SEQ ID NO: 435 - DNA, 546 bp, Homo sapiens
  misc_feature: Incyte ID No: 1042482.1
gcaaggacaaatacctggccaagcacagcgcgatctttgaccgcctggacgtcgtctcctacgaggaggtcgtgcggctccccgcgttcaagaggaagacgctggtgctcatcggggccagcggggtcgggcggagccacatcaagaacgcgctgctcgcccagaacccggagaggttcgcctaccccgcgccgcacaccacgcggcccccgcggaagggcgaggcggacggcgccgagtaccacttcgtgtcggcggaggagatggcgcggggcatcgcggccaacgagttcctggagttcggcagcttccggggcgacatgttcgggaccaggctcgacgccgtgcgccgcatccacgagtgcggccaggtcgccgtcctggacatcgagccccagaccctgaaggccgtgcgcaccgctgagctctcgcccttcatcgtcttcatcgcgcctacggaccagggcgccgagaccgaggccctgcgccagctccgcgccgactccgacgccatccggggccgctacgcccacctcttcgacctct

SEQ ID NO: 436 - DNA, 3949 bp, Homo sapiens
  misc_feature: Incyte ID No: 480324.16
gtcgccgccccgtcccgccggctgcccattggtccaggggcggactccaatcaccccacccctcggctggcccaggcaccgctgaggccggcctggtgagcccgccctccccgccgtggatttggccccgcggcgggacccgtcagccgcggttgtgtctgggaaggagagaaaatggcggcggagccgaacaagaccgaaatccagactctttttaagaggcttcgcgcagttccaaccaacaaggcctgtttcgactgcggcgccaagaatccgagttgggccagcatcacgtacggtgttttcttgtgcattgactgttccggggtgcaccgctccctgggcgtccatctgagcttcatcaggtccacagagttggattccaactggaactggttccagctgaggtgtatgcaggtcggcgggaatgccaatgcgacggctttttttcgccaacatggatgcacagccaatgatgccaacaccaaatataatagccgagctgcccagatgtaccgggagaagatccggcagctggggagtgcggccctggctaggcatggcactgatctttggatagacaacatgagtagtgccgttcctaatcactccccagagaagaaggactctgatttcttcacagaacacactcaaccccctgcctgggatgcgccagccactgagccttcagggacccagcagccagccccgtctacagagagcagtggcctggcacagccggagcatggccccaacacagacctgcttggcacctcacccaaagcctcactggagtccgtgtatctgtcagctaaaggggcccttcctgccagagaactgaaaagctccatcattggcaagaagaagccagcagcagctaagaaagggctgggtgccaagaaaggcctaggggcccagaaggtgagcagccagagcttcagtgagattgagcggcaggctcaggtggcagagaagctccgtgagcagcaggcagccgatgccaagaagcaggcggaggagtccatggtcgcctccatgcgtctggcctaccaggagctccagattgatcgtaagaaagaggaaaagaagctacagaatctggaagggaagaagcgagagcaggcagaaaggttgggcatgggcttggtatcccgaagctctgtctcccactccgtgctgtctgagatgcaggtgattgagcaggaaaccccagtgagtgcaaaatcctctcgctcgcagctggacttgtttgacgatgttggtactttcgcctctggacccccaaagtacaaggacaatcccttttccttaggggaaagctttggctcccgctgggatacagatgctgcctggggtatggacagggtagaggagaaggagccagaagtgaccatctcaagcatccggcctatttcagaaagagccacaaaccggagggaagtggagaaccggagctcaggcctcgagtctagtgaggcgcgtcagaaattcgcaggagccaaagccatctcatctgacatgttctttgggcgggaggtggatgcggagtatgaggccaggtctcggctgcagcagctctcaggcagcagtgccatcagctcttcagacctctttggggacatggatggagctcacggagcaggaagtgtatctctggggaacgtgctgcctacagcggacattgcccagtttaagcagggtgtcaagtctgtggctgggaaaatggctgtgctggccaatggtgtgatgaattccttgcaggatcgctacggttcctactgatccgagctctgtgactcaggcttacgatggtgacggcaacaagaactccacagttcccaggctggggatgctttgccttgtggaagctggggaggatttgttacttcgtatgtgtggtgtgtgtgtggggtggcctttgaggcgctcactcctgtgaggggaatggtcagtaccagcccttgtcctctgcctgtggactgagccctttattccctctcacaccaccctccgtgtgttagactcttgtccttctgtcctgcccccacagctgctgctcacttatcctgccatactgggaaagggggttcccccacgatggcttattctgggtccagactttccccaggtagggaaagcggaaggtagaaggctttttttgctggctctagggttcttctagttcgaggccttgggtccccatcctctggaaccagggggaggcctggaaggagttcactgtagacccgtcccatggggaaagaggctgcggacttgctgctgctgctgctgccagtggcctcttctgggtgccaggagaggggaaggacctttgtctgggcgttaccaagggctggaaactttacctggtacctaaaggtttcatttggtatcagaccggagacccttgggttctcccgtctcaccacccctttctacagtaagcacttggaagattgtttcagggtgtctcagggtccctctgtaccatctgctgtggaatgcaggaccctctgtgacattctttatcccttcttccccgggttggtggccatggagggtcttgtctgctgtgattcgactctggatgctgtgagcttgatgctggccagggaagcagaggatgtgagaggcagaggcaggctcctggggctgagctccttcctctgcatcattctgggcttggcctggacagcacccgccagtgagagctgtgggcctcaccctctggcagctgagccaagcactgtcattcttggtgccatcttcccctgccgcaccggcagtctcagcccagcccccacctttgggttgtaggttgggctcccaagcaacacagaccactcttccccttgcccctcccccagagggacttgactttctttctggactgtttgtattgaaacaaagtggtgtcaaaataaagcccctgcagggcctggctccctgttggtctgagtgaagcagtgtcctctggatcctgcctccctgcccagtgccggcccctggcctcactctctgggctcccaccggtaatggtagggcgtcggtaccgaagctgaggacactctctccagggcctcctgcttctctcttctctgaaagccaaaggcccctggctccttggctctgtgctgccgtgaggtccggtgcagcttcgacctcaccaccagccgttccagctcttcatccattgctgggtcgtgcatcagatcccccttgtcaggcaaagctccgagggcttggttgattccacggtgctttgagagagccatgaggaatccatagaaggtcagtctctgaacattgctgagggcctctttgacaagtgctgggggtgggcagctgtacttgtgccgatcacacaggttttccagacactggtagaacagcgacgcctccacgccctccagcgtgccggccccgcccaaggcaggtcgttggcggtgctgcccactggacgacgtcggcacaatcactgtgttggggttcttgcctgacagcaggtcctcatagatggcagccacactgtccaggaattctgagtagtaaaactggatctggaaggcaaagaggaaatctgaaaaagacatcaagcagtccatggcatcgtccatgagcacaatcctggctgctttctgagtgagctccagcgggaaatcaggacacagtaattgcagcaaacagtgatattctttcatggtcagcaaatcgccatttttgcccacagttcggaagcatctccagaaggcccgtaaaaatgataccctattgtggggggtggcttggacgaagctgaattctcgaaagagaatgtgtgttccctggcatacactgttaaaaccagatactcgtagtccggtagggctaggcgctccggactcagcatcctttgaccggggtggcttcaaagctccagctctccggcttccggaacccaggttgccgt

SEQ ID NO: 437 - DNA, 2222 bp, Homo sapiens
  misc_feature: Incyte ID No: 041856.14
gcggtgcggagccttgggcccggctgcggcccggcggcggccccggcgcggtgcgggcgttcgcggcgccccgggagctgcaggggccccgggcggcggcgaggccggagaggggcgggcccgggacaccggcacccggcgccctcggagccaaaggcgcgcggcggacacggcggggccctcgcgcgcctggagacgatgccaaagctgcagggcttcgagttctggagccgcaccctgcgaggggcccgccacgtcgtggcccccatggtggaccagagcgagctggcctggaggctgctgagccggcgccacggggcacagctctgctacacgcccatgctgcatgcccaggtctttgtccgcgacgccaactaccggaaggagaacctgtactgcgaggtgtgccccgaggaccggcccctcatcgtgcagttctgtgccaatgacccggaggtgtttgttcaggcggctctcctggctcaggattactgtgacgccattgacctgaacttgggctgcccacagatgatagccaagagaggtcactatggcgcctttctgcaggacgagtgggacctgctccaaagaatgattttgctggcccacgagaaactctctgttcctgtcacgtgcaaaatccgtgtcttcccggagattgacaagaccgtgaggtacgcccagatgctggagaaggccggctgccagttgctgacggtgcacggacgcaccaaggagcagaaggggcccctgtcgggtgcagcgtcctgggagcatatcaaggctgtgcggaaggctgtggccatccctgtgtttgctaacgggaacatccagtgcctgcaggacgtggagcgctgcctccgggacacgggtgtgcagggcgtcatgagcgcagagggcaacctgcacaaccccgccctgttcgagggccggagccctgccgtgtgggagctggccgaggagtatctggacatcgtgcgggagcacccctgccccctgtcctacgtccgggcccacctcttcaagctgtggcaccacacgctgcaggtgcaccaggagctgcgagaggagctggccaaggtgaagaccctggagggcatcgctgctgtgagccaggagctgaagctgcggtgtcaggaggagatatccaggcaggagggagcgaagcccaccggcgacttgcccttccactggatctgccagccctacatccggccggggcccagggaggggagcaaggagaaggcaggtgcgcgcagcaagcgggccctggaggaagaggagggtggcacggaggtcctgtccaagaacaagcaaaagaagcagctgaggaacccccacaagaccttcgacccctctctgaagccaaaatatgcaaagtgtgaccagtgtggaaacccaaaggtgagtgggttccggctgcaagccaccaaggcttcagctttgggggtgggcagggtggtctctgcactgcttggggtggcaggtctggtgcccgcccagctgggtttgcaacgtggctcaaggtggcatggatgcctcaggacggccccttgcttccagccaagcccctgcccaggcctggaggggaagagagtctgggtgggtgggggtgagggagaggcatctggcttgggagcagttcccaagggctgcatccaggccgtgggcatctggcagaggcttccccagtggggctgctcccctgctggccagcctggccccgggagtggtgctggccacaggctcccgagatttcctgtgcccagggcaacagatgtgtgttcagcctgtgccgcggctgctgcaagaagcgagcctccaaagagactgcagactgcccaggtcacggattgctttttaaaaccaaattggagaagtctctggcctggaaagaggcccagcctgagctgcaggagcctcagccagcagcacctggaacaccaggtggcttctccgaagtcatgggcagtgccctggcctgaaggcccacaacccccacccccaggactgctgctggagcctggacacgtcctacttaagaaaatgccttttactcagggaatctcctgctacttaatgtggaaagacacgcccatgtcccccttcggcccactctgggggcctggaaatgctgcagtggggagcaggccccaggctggacctgccctgtcctcagcacgcgtgtgcaaaagtgaacaataaatcatttcaaagatgcg

SEQ ID NO: 438 - DNA, 1721 bp, Homo sapiens
  misc_feature: Incyte ID No: 252542.6
ggagtttgaagctttcttaactcagaaagaaacttccaacacagtttcccaaagaaaaatgggcaccaagggcaaagttattaaatgcaaagcagccatcgcctgggaagcaggcaagcccctttgcattgaagaggttgaagtagctccccccaaggctcatgaagttcgcattcagatcattgctacctccctgtgccatactgatgccactgttatcgattctaaatttgagggcctagctttcccagtgatcgttggccatgaggctgcaggtattgtggaaagtattgggccaggagtgaccaacgtcaaaccaggtgacaaagtaattccactttatgcacctctatgtagaaaatgcaagttttgtctgagtccactcacaaatttgtgtgggaaaatcagtaatctcaaaagtcctgctagtgatcaacaactaatggaagacaaaaccagcaggtttacctgcaaaggaaaaccagtttaccatttctttggaaccagtacattctctcagtacactgtggtgtcagatatcaatcttgccaaaatagatgatgatgcaaatttagagagagtttgtctgcttggatgtgggttttcaactggctatggggctgcaatcaacaatgccaaggtcacccctggttcgacttgtgctgtctttggcctaggaggtgtgggtctttctgctgtaatgggttgtaaagcagcaggagcttccagaatcataggtattgacatcaacagtgagaagtttgtgaaggctaaagccctgggagccactgactgcctcaatcctagagacttacataaaccgatccaggaagttatcattgaattgaccaagggaggtgtggattttgcccttgactgtgcaggtggatctgaaaccatgaaagcagccctggactgtacaaccgcaggctggggatcatgtactttcattggagtagctgctggtagcaaaggattgactatttttccagaggagctaataatcggccgtactataaatggaacattctttggtggttggaaaagtgtagattctatcccaaagctggtcactgactataagaataagaaattcaatctggatgcactggtgacccataccctgccttttgacaaaatcagtgaggcatttgacctaatgaaccaaggaaaaagcatccgaacaatcctcatcttttgaagatgccaggagcaattcggaatactatctgattgaatgtgaacctgcctggttaatttattacctgatttgatgaaccaaggaaagccatgagtttaaacaaatatttacatttaatatgggaacataaaagagctttaaatattatagactttgtacctgttatatatatgaatattccctatgttaaataataataataactagtgtttatgaatagaatcatatcatctttagaaattgtttaaaattagttctgggaagttgaaagtggggaatgaagagataataaataaaactagattggccatatgtttataatttttttagattgggtaatgaatacatggagtttcattatacttttctctccacttttgtctatgttgaaaattttctgggagctaaatgatgagaacacatggacacatgatggggaacaacacacactagggcctgttgagggcagggagtcggcagagagagagcatcaggaagaatagctaatggatgctggggg

SEQ ID NO: 439 - DNA, 3183 bp, Homo sapiens
  misc_feature: Incyte ID No: 233720.7
gtgatgtcatgcaggcaagatggcggaaggggaggacgtgggatggtggcggagctgggctgcagcagagctaccaagcagtcaaagagaagtcctctgaagccttggagtttatgaagcgggacctgacggagtttacccaggtggtgcagcatgacacggcctgtaccatcgcagccacggccagcgtggtcaaggagaagctggctacggaaggctcctcaggagcaacagagaagatgaagaaagggttatctgacttcctaggggtgatctcagacacctttgccccttcgccagacaaaaccatcgactgcgatgtcatcaccctgatgggcacaccgtctggcacagctgagccctatgatggcaccaaggctcgcctctatagcctgcagtcggacccagcaacctactgtaatgaaccagatgggcccccggaattgtttgacgcctggctttcccagttctgcttggaggagaagaagggggagatctcagagctccttgtaggcagcccctccatccgggccctctacaccaagatggttccagcagctgtttcccattcagaattctggcatcggtatttctataaagtccatcagttagagcaggagcaggcccggagggacgccctgaagcagcgggcggaacagagcatctctgaagagcccggctgggaggaggaggaagaggagctcatgggcatttcacccatatctccaaaagaggcaaaggttcctgtggccaaaatttctacattccctgaaggagaacctggcccccagagcccctgtgaagagaatctggtgacttcagttgagcccccagcagaggtgactccatcagagagcagtgagagcatctccctcgtgacacagatcgccaacccggccactgcacctgaggcacgagtgctacccaaggacctgtcccaaaagctgctagaggcatccttggaggaacagggcctggctgtggatgtgggtgagactggaccctcaccccctattcactccaagcccctaacgcctgctggccacaccggcggcccagagcccaggcctccagccagagtagagactctgagggaggaggcgcccacagacttacgggtgtttgagctgaactcggatagtgggaagtctacaccctccaacaatggaaagaaaggctcaagcacggacatcagtgaggactgggagaaagactttgacttggacatgactgaagaggaggtgcagatggcactttccaaagtggatgcctccggggagctggaagatgtagagtgggaggactgggagtgagggagccagagggagcagctcccccacccatggcatctctcgcctccctcgctcgtctcagcccagccctggaagactgagaatgttcccccaaatctcctctgccaaccagagctctgggcacagattctggtggctccctgctggccctcttgggcctctgctcacacctgggaaggggctctctaaatcccggccagaaactctgacttgtgccaacaataggatgacccaagggagaggaaacctatcctcctcaccagaagagcctgtgtttttctgctgaacacccactgttcctgaggactcctgctgggaagtcccaagggatagttctagcccttctgcctgtgtagacagaagctaaaccaccagtctctctcggaggaagctgagacaacatactctgtccatacataagcaggcagggagggccatgccacctacccttggctaaacagggacagtgaacacattttggttcctatcccagtgggtaagaggcacttatctctgggaaatttgcctctcttgggactctccccctcccaggcattttccattcctggaaaggctcctttggggttcagaatccagagaccaaaccctgacccacctccttcctttcctccagcccacgctggtctgtccccatgccttcccagggcttcttcatgtcagatgcacccaagtccttagcccagctgtgccacctgcaggagttcgctcttgcgtttcttcccctccccaagaagggagggggctacttcaggcccttctgtgtgttgcctggcaggataccttgtccaaccagctacccacctcaactcccctgtagtttaggacacaaaacagctaccagcggtacagagcggtgatcaaagccgagtacttacaactctggtaagcctagcttctccgcctcagcccttctgcttctggaagggctatcctgggggtgaacttgaaactctcatcaggcttctgcaaaagctcttcttcctgaagacagacccagcctttgtgctctcaccctccactctggtaaagctgcacctctgggggaatgaggggctgcaggaatctctggagagcctggtgcttcacgatgctgctctggtgattcttgtacctaatctggtgtgctcaccaatgagtgaaagggatcgtgggtcagggacaccgagagagtgaggtcacttccacttcaaaccttcagtgagggggtgggatggagagaatgctgaatcttttttttgacgggatggggtttttctctttgtaattatttctttagtttaattaaccttttggttgtttgtgcaatattatatattttaaattataatgcatctccccagagtattttgtagctgggaaaagaaaaaaggaaaaaaagaaaaaaagattctaacagctgttagttttataattaaaaaagaaagaaaaaagaactttgtcctgaaccttttacagacttgccgttaacagcattaaagtgattcacccgaagctgaaaggtgtctgggggtctgtttttgtccccttggcagctgcactgggccagggcaggactggcttcccacttggagccagagacagggtagggggatagcctaggtccagaggacgtaccttgtcctcatcccagattcagctttgcctttgggatgagaaagggtcagggctcgcaacaggcctctcactgggacaaggagtcgggaggccatctctgcactcccagtgcctctgctttcctttggaaaggaagttgcaacaagaatggcttcagttgctcttggtcatttttatcctctcttccccctgtttgtatatgattcttgggtctattttaattaactttagtatg

SEQ ID NO: 440 - DNA, 592 bp, Homo sapiens
  misc_feature: Incyte ID No: 400104.6
catcacaacacagagacagacaggagcccgccctgctttaatgcgcatgcgggggagccgagaggcggggctgctggcgggggagccgagaggcggggctgctggcgggggagagcgtgtccgggcgctgcactctgcgcagggctcttggatggcgctcaccacgtcacgtcttctgtgctttcggccaagcactgggccaggtggctgtcaacatccagctgggtcagcctgggggcgaactccttctggcacatggggcagctgcgcagggccgcggcaccctccacagacggctgctgctccaccctgggggccctgcagggatcaggtgccgggcgctggggcagggacctggcgggggattccaggtgccctcctgccccgtgaagcagccggtaggaacggcccgggccccacaggtccggcggaaagggtgtccaggaaaaggtcttgggtccgacagtgaagacttcagtgggctccgggccgcacctgggctcctcgtgatccaggatcagctccgggctcaccgtgcgcagtagctcggcccagagccgctcccgctcatcaccccccaggagaaaccagg

SEQ ID NO: 441 - DNA, 581 bp, Homo sapiens
  misc_feature: Incyte ID No: 1001899.1
ctctaacccattctgaagtttttgatcttttccttttgccttttgaatagagatgccatgggggtggtcaggaaagaggccgggctctctggctgactgtgggcctgagaagttgggacaggaagccaggaaaaacccctgttggcttgtttaccctcaggcagccatagcactttagcctccggaaagggggcagaaggacggtacagcttctgcattgattgccctcagtccttcagtatgtgaagtgagactctgttctgtctgtattagagccctgcgcctgctgcctccgccccccagggagagagcagtcaggctttgtggactttcttgcaacccatgatgggtaggctgtggagcaggggagattaggaaaggaagatgggttggtgggacacctggaggtgggggacaggatgctgccgccttggtcctggggagaggggagttcagagcaggggtcgggtggggatagtatattgggtcttagaatggacaagatagcagcagccagtatggatcaatgtaaaaaaaggggtctgggagggagaagccagactcagctagttctagatcgc

SEQ ID NO: 442 - DNA, 2984 bp, Homo sapiens
  misc_feature: Incyte ID No: 198345.3
cttgagttcttcacaagtctcacgtcacttagcgacggtcgggaactcctcagtggtagtttcgggagccattcattcattttattcatttcatcattctttcaacagtcataacgtaggtgacgacgactgactcatctcttaaaagatgtgtgtgtccctcgacaaataacctgtctgcccctatcgttctgtaggaggacggagtccagagaactacaactcccatcaaggcacttggggggatcgccgcggctgagggagagactatggcttaggaaccaccattcgcgtgaggctctgctccccgcgcctgcgcagagtgcagggccacgtcgcttttgctgtaccggggaccacgcgtctcatccatgggcttccgcggactcgcgccgggtggcagatggcggcggtgccggggggcacctttccagccctacctagacaccttgcggcaggagctgcagcagacggacccaacgctgttgtcagtagtggtggcggttcttgcggtgctgctgacgctagtcttctggaagttaatccggagcagaaggagcagtcagagagctgttcttcttgttggcctttgtgattccgggaaaacgttgctctttgtcaggttgttaacaggcctttatagagacactcagacgtccattactgacagctgtgctgtatacagagtcaacaataacaggggcaatagtctgaccttgattgaccttcccggccatgagagtttgaggcttcagttcttagagcggtttaagtcttcagccagggctattgtgtttgttgtggatagtgcagcattccagcgagaggtgaaagatgtggctgagtttctgtatcaagtcctcattgacagtatgggtctgaagaatacaccatcattcttaatagcctgcaataagcaagatattgcaatggcaaaatcagcaaagttaattcaacagcagctggagaaagaactcaacaccttacgagttacccgttctgctgcccccagcacactggacagttccagcactgcccctgctcagctggggaagaaaggcaaagagtttgaattctcacagttgcccctcaaagtggagttcctggagtgcagtgccaagggtggaagaggggacgtgggctctgctgacatccaggacttggagaaatggctggctaaaattgcctgagaggcagctctaaagcacaagacctggatgtgtgacacacagttttggaaaaaggtctgtggtagtctggagttgatgaggaaggggtacaagatgtggttagaaacatttctttgttctggaaacaaagtactgttgaaaccagcttggaattttttttttttttttttttaagttcagttctcccttatggctgcctttcaaacaagtaccttttatctgatgcctgtatcttccctttgttaaggtgtaacttgatgtagggtcaaggtttttgtgacaacaggcagactccacacagagaggatatgatgagaatatggccatcacctgaaaagttttcttatcttctgtgcttttggtccctggaaacaaatccgcctatgtatgaagctagttgatttccagttgcactatttccagttgcctctgaagttcacaggcaatacattgtctagtcctttgcgaatttctctgatttgtgggcacagttatgaagtttccccacatgtgaagacaggtacaaaatagcagagccaagcagacagtgggtctattcttcattagctcagtgacttgtccacactcgtcttagcacttacgtttcaaaagcttgtcacaaacccttggagtcattcccagataatagaactggaaatgataaatcccctaatgccaagggtctagtgtgttcttagtggttatactgggaagtgtgtggagatttaggtgctgctctgctgctctggatggctgaaggctcctgggccatcttcatgtgctgcttgaagagctcctattttgtactcctggctagaatgctgtggaacaaatacaaagtgaaaaaagttctctgtagatttctgaagtgcatattcattgatgccaagaaaaaaaaaaagttgcctttttgaagtgatgttttttgctgtcttcttaaacacaaggcttttttgaatgattagtatatttcatggtaaagaaaacagcctgtctggctcaaagcaattaaatagaatgtaatggtgagtacaaatgagtgcacatgtcaggactcaggtctaactccttgtctcctgagcctaaagattgcaacatacacaagaacacactcctattcctaccccacacactcagggacaagcccaactaaagcttacaaggagaccagggtggctctgtccaggggagaagccagttatggaacagtgcattgagagccatggtaggagaggcccacagttctctggagcatgcagcaggggcaccccacctggccttgaggatcagggggagtcaaaggataaagcatggggctgatgacgtctgagggagtgtgatcctccatgtatggcctctgcctgctgtctcacatgtcccttctggtggtcacttgggctctaggagtatacgtcacctcagaccatctggcagaaatactccaggctcctaccccaaagcacatgtcagccttgctgctggagcacgaagacaatgtaaatgaaacatgaaatggaggagttgtgagaccctgaccctgagtccttacttgaaagctgctgctggtgttctgagtgtcttttggactcttatttcttgcccttttccttattaggcaagcagtaacttaggaagtaggtaagagcaataaatgtgacatgttatgtcatcatagtaggagctcatgggaataaaagtcagtggcttgatgcttctgttagaggcaacaaacaaaaaaaagagcagttttacgggtattcaaaatacctttgaacaagtattctaacacaagat

SEQ ID NO: 443 - DNA, 5222 bp, Homo sapiens
  misc_feature: Incyte ID No: 230889.9
gtttcggagtgcggagggagttggggccgccggaggagaagagtctccactcctagtttgttctgccgtcgccgcgtcccagggaccccttgtcccgaagcgcacggcagcggggggaacttcagccctccaggcggggtgggttccaggtccgggtccgaggcgggcgctggaggctcggccccaggccggagaggaactcctttcgcgagctgtcgccgtgggcccgcattgtctgcaggaactctccggaatcgggagggggaggactggatcgcgcttccactgggattcgtcaagagttccggcggcagctgcggcggtggcggagactccctttgtcctctcaggacctccctctctccctccctgtcagctggtgggtcccgctgccgcaggcgccggcgtctcagctgctcgccgccccccaccccagagtgcgtgccgggtgactcccgccacctttgcgaccctcctgagcttaggggactgcgagcgggagggagtctcaggcccccgttccgcaggatggtggcggagcggtccccggcccgcagccccgggagctggctgttccccgggctgtggctgttggtgctcagcggtcccggggggctgctgcgcgcccaggagcagccctcctgcagaagagcctttgatctctacttcgtcctggacaagtctgggagtgtggcaaataactggattgaaatttataatttcgtacagcaacttgcggagagatttgtgagccctgaaatgagattatctttcattgtgttttcttctcaagcaactattattttgccattaactggagacagaggcaaaatcagtaaaggcttggaggatttaaaacgtgttagtccagtaggagagacatatatccatgaaggactaaagctagcgaatgaacaaattcagaaagcaggaggcttgaaaacctccagtatcataattgctctgacagatggcaagttggacggtctggtgccatcatatgcagagaaagaggcaaagatatccaggtcacttggggctagtgtttattgtgttggtgtccttgattttgaacaagcacagcttgaaagaattgctgattccaaggagcaagttttccctgtcaaaggtggatttcaggctcttaaaggaataattaattctatactagctcagtcatgtactgaaatcctagaattgcagccctcaagtgtctgtgtgggggaggaatttcagattgtcttaagtggaagaggattcatggctgggcagtcggaatggcagtgttctctgcacttacactgtaaatgaaacatatacaacgagtgtaaaaccagtaagtgtacagcttaattctatgctttgtcctgcacctatcctgaataaagctggagaaactcttgatgtttcagtgagctttaatggaggaaaatctgtcatttcaggatcattaattgtcacagccacagaatgttctaacgggatcgcagccatcattgttattttggtgttactgctactcctggggatcggtttgatgtggtggttttggccccttttgctgcaaagtggttattaaggatcctccaccaccacccgcccctgcaccaaaagaggaggaagaagaacctttgcctactaaaaagtggccaactgtggatgcttcctattatggtggtcgaggggttggaggaattaaaagaatggaggttcgttggggtgataaaggatctactgaggaaggtgcaaggctagagaaagccaaaaatgctgtggtgaagattcctgaagaaacagaggaacccatcaggcctagaccacctcgacccaaacccacacaccagcctcctcagacaaaatggtacaccccaattaagggtcgtcttgatgctctctgggctttgttgaggcggcagtatgaccgggtttctttgatgcgacctcaggaaggagatgagggccggtgcataaacttctcccgagttccatctcagtaaaagggaagcaggaagaccaagaaggtacgaagatggcacattttcacatagctgattttcaaccaaatgaaaaaaatcaagtgcatttcagaagcttttggaagagcagcttaattcctctcagtcgggaaatgttttctctgccttctgctttgcttgcaccaaacatttctaaacacttgttctgccatctacatgggaggtgatgaaactcagtggtaactcatgatttatgacattgaaaataaagaggaacattgacctgcagactatggtttgtacaagaaagtttgtttgaatgtgtagaagaggaaaaagcaacaacagcaacaacacgaagatgataccaaaacaaggaccacaaaacaactagccatgatgggagacaggagttttttacatggaaacatggcacttgtgtttttatgtggcaagatctttatccataggcagagtatgaaatttcccaccaggctaagcaaataaagaagtccattgccttatagctatgtcagatcacagaatccttccaagtgctctatcacagtgtgccttatgggaagtttctgactggaaaatcttgtcattctaacactgaaaagtgcacacgcatgacaaaatgtagacaagatgcctcaaggtattggtagcaagcaagattttgccctttagttttcgaagacacctttctttcattatgcactcgggacaagaaaattaatagagcgttattccacagaaggcctctagccagagatcttgagtgtagtgcaagggactcattttttgcgaacttgtccctgtgactagtagattcccccttttcctgtgtttaggatttagtagtgcataaagcattaatatccataaacatacctagaagtttgttttgcttttaatttaaaggaagcagtaaccacaaagcttccgctcagggttttttctttcttcaagtctccaagggctcttcagcgtcacaagccagcaactctctttgcattaaaatttcaaagtttaattaatataattaaaagcaacagcaagcagcagcctgtgaagattttgctcatcttttttatgccttttgacattgaatgacctattactgtatgcgcattacttggattttgaggggcactctaccttggttatgattcagtagaggaaaaagaccacctttcttcaatttacaaattaaatcttctggagggtcgctatcacaaaacattgacgatgtatgtattataattttttagaaaaaccaccatcgtggtcacgtcgacgatgccaaattatgttagcgtgagcagaaacaccgtgggggaggaaggcagcagctgaagaaaaaagctcaaatgatctagtcactttcgatactgtacttcagatgcgaaatggatattcgagtggaaacctgacaaagtgcgcctgctttgatgtgaactggtatagacaatgaccagtggctgggtcagtgggatgtctctctgtgagcacaaaggcttatcaaatgacactaaagataagttcaacaaccatcacattggaagggagaaggcgaacatttcatgtttggcgggcatgtgagtgcacaagatggaaagagcgattggagcatcctggtataattacccccattgtgctcttaatggaaatttcaaaggacgggagtattctgttggttggtgtccaggtttgtggcactgttccaagaggccttacacacacacacaaatatataattttctatacatatatatcctctagcttgaaacttttgctcaagtttatttatgtcactggctggctggatccaaagtcatgtgtccacacattcataaataaaaattttacctatgcctgtgctaccatttctttaagcccacataaagctaatgccttcttgggttgaatatgcagttgttatgcttagtttcagggatggaattctattcagttccaaaatgtccctcatgttcacagatgatactattggcagtagctgcatatgcaagtgtaacttggaagcctgatatagtatacccaaccctttctgcaatgagttattgtatccctttgttctgcatttgcatctggaacaagacctaatgtggcttccttaaatgggcacttcatttctgatgagtgcacaccaattattgctattttaatatcattgagaatactacagaagctaaggctatgtttctttggtaactacttcaaatttctctagaattatgtagcatacttacattttgctgcatgaacaatgaaaattaacctctgcctttaaatggaaaaataactttctgtagattgttatacagctactatgaagagctcttaatgaagaggaagtggcagtggtctatatgtagactgaaaaaatatcattaataaagttcaaagactgatggaatttcattgcccttaaagatatgaaccagatctgttttatgcttttctccaattatactaactagcagttgaaaagaatttgttttgaagagtgttattttcttaccaaaagaccagatcaaaaatccctatacttttccaccaaaaaaagattaaaatgaagccatttctataaatttaatggcactttatattttatatagagaaatagcttctgtttgattttctggacaccatgtcagtcaagatctactttctgtgtaaaaatgaataagtcttgcacataatccattcgtgttgcataaggttgcaaaaacaattaagtgggaaatgactcctaacttatgtgtctactctgcctagaaagaaagttttgaaggcatctatatatatttcataacaatgtctgttctttatggatttgatccataaatatttatctatctgaaaactttgatacttggaatgttttccttagagcatttggtgctccaagaaaaaacatttggtgctaagagttgcagcactgatgcctttccctaagttaattctattttaaaaatttatatttccttcccaatgagatgcagagtaaaatttgagaccctccattgactagggagcagcatctgtcatctatggttaattactattttgacaaaaatatagaaggtttaaacccccatgtatttcagattgttagagaaagaagtagtttgcttatatttcccttgaactttattctaaccatttaaataataaattattcaatatttgttataataaatccttactagatacaag

SEQ ID NO: 444 - DNA, 1698 bp, Homo sapiens
  misc_feature: Incyte ID No: 1307204.1
cttggggcctgggggtctggcttcaagacaccagtttactgccccaaaagtcagagccacattctgagaatcctatcaggccataatttgcaaggcaagcataaaactccaggcaaggacctagcattctcagccaggccctgggattctgattcctctcctgggttctgggtcaggtattgagatttccatacaggtcctaagtttctgatgctcagacatggcctaaagcatccagtccatgacctagaactctgggtctctcccctgccctgtttaagggattctgtttcacgggccctgtgcccttaagcccttcatttgcccctccagggccatctttcccccaaggccacccaaggatagagctgttccagtgctgggtgccctgctctgaggcctggaaggacccttggtctgggcacctagttgacagattttgggggctggggtaaggggaggtgaccatgagcccggagttggacaagaacctagccactgtaggattggcttggagaaggcaaggggttcccatgctgctatctctgcacccctgtggcagggcccgtccctgtgcccccagatgcagcaacctagctggagtgccaggcctgggtacaaaagcatcttttcagcctgcagtccctgcccttgtccccgcccctctatgagtgggcttgacgcaaatgtccagaatggttggaaaacaacagtggtatatcccagccatggcctcctggttaccctcccccaaccccagccccagccccagccccagccccagccccagccccagcccttccatttctgctctcctatgtacacacaaaggcacccactttagtccagtgtagacacacatgcacacacacatagacacggccgcttgagaaatagctcaaatacccacctcccacagctccataccacacagctcagcatagcacgaggcacacacccatatgcacacccgtcgcacgtgctcacacgtctcattttactagaaacatgccacagcctacctggcgctgttgcctttgggccaggggaagggacttcttctctggaaggagggttcctgggcacagtggctacaggaggcctcagtagtcctcggggccttccagcagcccagcaggtcaagcgcctcctttggcctggctggggtggcaggagctccgaggggtggctgctcttcctccatgcctgtccctccgccatgaggccatcccatgggggaacgtctttgctcccaggcctacccggaccctgactgaactctctccttgtttttgtctcccgcccccgccagaaggtgatgcttccgacgggagccgccttccggtggtttcagtgacggcggcggaacccaaagctgccctctccgtgcaatgtcactgctcgtgtggtctccagcaagggattcgggcgaagacaaacggatgcacccgtctttagaaccaaaaatattctctcacagatttcattcctgtttttatatatatattttttgttgtcgttttaacatctccacgtccctagcataaaaagaaaaagaaaaaagtttaaactgctttttcggaagaaccacaccaaaaagaggtaaagacgaatctataaagtaccgagacttcctgggcaagaatggacatcagtttccttcctgtgtcgatgtcgacccgggattccggaccggta

SEQ ID NO: 445 - DNA, 2523 bp, Homo sapiens
  misc_feature: Incyte ID No: 1248547.1
  unsure 1431, 2266: a, t, c, g, or other
acaatgccctgctcagggtaagggctgcacaaataccagccatgggtattatcagcaggatccaggagagcacactccagggtcccgggtggacgcacccctccctagaagacaaggctggtgatgcaggggccatctcccccagcggtgctggagactgaaggagcttcttcctgacttgaaggctgattggttcaaaaaactcagcaaaaagtttaatagcaagagtgaagacatttccaccttggacaccttgaccatgtgcctgccctgagcagcgaggcccaccagggcatctcctgttgtgggcagcgagggtccaggttcctggttctgtggtaccctcggtcagtttggcaggtctccctctgcagtggggtctgggcctcgagccccaccatgtcgagcctcggcgggtggctcccagagatgccgagcggctagttagcagacagacagtcaaccaagtggacagtcggttggacagatggctagcagttggcccaaaggcaggagcagcagacaagagtgcagtggtggctgccgccgtcagccagtcctcagtggcagatgacacaccaccccccgagcgtcggaacaagagcgggtatcatcagtgagcccctcaacaagagccttgcgccgttcccgaccgttctcccactactcttcttttggcacgcaagtggtggtaagtggccggtggcagcatgatgggcggagagtctagctgacaagggccactgcggctgcaagccgctggccttccctgttgggccaattgggcatgacctggcggcggccatgggcagtggacaaaagccaaccctacctcaaagccacaaaagtggtgctgtggccagcctgctgagcaaggcagagcgggccacggacgctggcaggccgacgggacacgctgacgctgcagcaggtttgcgcagctccacagcagactgctgaagcgcccgtggtgcaggacgcatctcccggctgatgagcgacggcggggtgctggcctgccttgacatggaggctgtggcaggtgccgaagccctacaatggccagtccgacttcccctacctggggcgctttccccatcaacccagggccttctttcattattgaccccggcaggtgttgttcctgggccgagagcgcgctgcacatgggcgggcctggctgagtaccccatgcagggagagctgggcctctgccatcagctccggcaagaagaagcggataactgctgctggcatgctgcgctgccctgtccggcggcgcattcaactgcgaagcagtgcagcagttgtaggaatcgaaagactggccatcagatttgctaaattctagaataatgtgaggaactcaataatagaagccttccagctgctctggaggtatacggcgccttagagggagaaggtgaatgncttccgacgggaagccgccttccggtggttttcagtgacgcgcggcggaacccaaagctggcctctccggtggcaatgtcactgctcgtgttggtctccagcaagggcattcggcgcgaaagaacaaaacgggatgcacccggtctttagaaccaaaaatcattgctctgcacagcatttcattcctgtttttcatatatatattttttgttgtccgttttaacatccccacgtccctagcataaaaagaaaaagaaaaaaatttaaactgctttttcggaagaacaacaacaaaaaaagaggtaaagacgaatctataaagtaccgagacttcctgggcaaagaatggacaatcagtttccttcctgtgtcgatgtcgatgttgtctgtgcagggagatgcagtttttgtgtagagaatgtaaattttctgataacctatttgaaatctaggttactaataagtcactactagtaatttctaagcacagtttaactccaccctcatttaaacttcctttggattccctttccgaccatgaacatagtggcatacgtttggcctggagagatccactcacgttcataacagagaaatgttgatgggcgccgtgtagaagccgctctgtaatccatccacgcgtgcagagctgccagcaggggagctcacagcaaggggaggtgagcaccatggccagctgtagctgcacctcacagtcccgagacctgggatccccccacccccaacagtgattttggaaaaaaaaaaaatgaagagttctgttccgtttatcccattgcgatctgggggagccccatcttcgatatttcccaanccctggctacttttcttaggaggaaaataaggtcctttttttctggccttgctaatgggcaaccagaaagaaagggcttcttttgcgtggtcccctgctaggtggaggagtgggtcccccagggggccccctgcggcctgggccccccactcccacggccagcttcctgctgatgaacatgctgtttgtattgttttaggaaaccaggctgttttgtgaataaaacgaatgacatgtttgtgtcacgaagcaaaaaa

SEQ ID NO: 446 - DNA, 1179 bp, Homo sapiens
  misc_feature: Incyte ID No: 1247195.1
gtgtctctctgcgtcttgtctatttgttttctctctttcttctctgtggccctcccctttgtctcttcctttctgttttctcctgtagttcctcctcttctctcccctgattggtcatgagtccccttgatcaggctgtaatacgtgctgtgtgtctcagtggaggttcctgctggggaggagtccgttgtcttgtgcatgggggcccgaacgtaggccctgcagcccagctgcttgggggcattccactctgctggccaccagctgtgactgcaggtgaagtgaaactgctgctgtcctccgagacacccattgaggggaagaacatgtcctttgtgaatgatcttacagtcactcaggatgggaggaagatttatttcaccgattctagcagcaaatggcaaagacgagactacctgcttctggtgatggagggcacagatgacgggcgcctgctggagtatgatactgtgaccagggaagtaaaagttttattggaccagctgcggttcccgaatggagtccagctgtctcctgcagaagactttgtcctggtggcagaaacaaccatggccaggatacgaagagtctacgtttctggcctgatgaagggcggggctgatctgtttgtggagaacatgcctggatttccagacaacatccggcccagcagctctggggggtactgggtgggcatgtcgaccatccgccctaacctgggttttccatgctggatttcttatctgagagacctggattaaaaggatgatttttaagctctttagtcaagagacggtgatgaagtttgtgccgcggtacagcctcgtcctagaactcagcgacagcggtgcccttccggagaagcctgcatgatcccgatgggctggtggccacctacatcagcgaggtgcacgaacacgatgggcacctgtacctgggctctttcaggtcccccttcctctgcagactcagcctccaggctgtttagccctcccagatagctgcccctgccacgcaggccaggagtcttcacactcaggcaccaggcctggtccaggaggagctgtggacacagtcgtggttcaagtgtccacatgcacctgttagtccctgagaggtggtgggaatggctgcttcattcctcgaggatgcccgggccccacctgggcttgtctttct

SEQ ID NO: 447 - DNA, 2036 bp, Homo sapiens
  misc_feature: Incyte ID No: 474736.11
ggacgcggcccctcccagctccccccacagcccagctgttccctccgcggattctccggggctggttcatcacctccgaatattcctgtgacaggagacgcttgcaaaacccgcctccagcctccagcagcaaataaatagaaggcttgcagcccagaaggagccagaagaagtttctaggcgcgcgtgccctgggtttattaagctcctggctccgctctagacctcagcggttctggctgccagcctgggcagcctgggaagcctgggaggacggtggcttgccggtctgtcgtgaggcagtgcggacggggaccctctgggattctgctggatctgccccgggggttacctttgggggctgggaccccagtcgaggggacacaaccgtccctggcagtggttggttctgcttctccctgcagaaaagcagcattttcggaagctgaagaataagctagcccagccacaccaccttgttgtgtgaccttgggcaggtggttctgtctctctgagcctctgtttctctctgagctgagcagccaccatggctgacggtcagatgcccttctcctgccactacccaagccgcctgcgccgagaccccttccgggactctcccctctcctctcgcctgctggatgatggctttggcatggaccccttcccagacgacttgacagcctcttggcccgactgggctctgcctcgtctctcctccgcctggccaggcaccctaaggtcgggcatggtgccccgggggccccactgccaccgccaggtttggggtgcctgccgagggcaggacccccccacccttccctggggagccctggaaagtgtgtgtgaatgtgcacagcttcaagccagaggagttgatggtgaagaccaaagatggatacgtggaggtgtctggcaaacatgaagagaaacagcaagaaggtggcattgtttctaagaacttcacaaagaaaatccagcttcctgcagaggtggatcctgtgacagtatttgcctcactttccccagagggtctgctgatcatcgaagctccccaggtccctccttactcaacatttggagagagcagtttcaacaacgagcttccccaggacagccaggaagtcacctgtacctgagatgccagtactggcccatccttgttttgtccccaaccctagggcttctctgattccaggatacattactttagctgaactcagatttagtgcaagtaaaatgttagagggtgcgggggtgaggactgaccacagattccctggatagtgtagtggtagatttctccacaggatagcgcaattggcaaatcatgcttggttgtgttaggccaaaatactagttttgctttctttaccttttctatcttgatgaaaatgttgcacattctatagttgcaaaacacataaaaggggacttaacatttcacgttgtatcttacttgcagtgaatgcaagggttacttttctctggggacctcccccatcacccaggttcctactctgggctcccgattcccatggctcccaaaccatgccgcatggtttggttaatgaaacccagtagctaaccccactgtgcttccacatgcctggcctaaaatgggtgatatacaggtcttatatccccatatggaatttatccatcaaccacataaaaacaaacagtgccttctgccctctgcccagatgtgtccagcacgttctcaaagtttccacattagcactccctaaggacgctgggagcctgtcagtttatgatctgacctaggtcccccctttcttctgtcccctgtgtttaagtcgggatttttacagagggagctgtctccagacagctccatcaggaaccaagcaaaggccagatagcctgacagataggctagtggtattgtgtatatgggcgggacgtgtgtgtcattattatttgagttatgctgttgtttaggggtaaataacagtaaataattaataataataataataataataaaggagctgacgttcttaaaaaaaaaa

SEQ ID NO: 448 - DNA, 552 bp, Homo sapiens
  misc_feature: Incyte ID No: 1098449.1
gtgcctcattaggttactactgccatccccctgcatcctggaatcattctcctcattttaatgagaatattacagcaatcatgaagaggggctttaatctagaagaactagaaaagaataatgcacacagcatacaagtcctcaagggccctcatttaactaataaaatccttttccggtcttcgggcctgacaaatggaatactagaagaaaaggacatccccgaagagtcaccaaaacagacagaagaccaacaggatggtgatgatcaagaacatgttactggtgaaaaaaatgcagagatctcagatgtgactcctgtagaagagaccagggagatgtcacctgggcaatcaacagcaagtaaaccatctgacagatcctttatcttggataaaatgagtgaagaagacgatgcctatgactttaccacagattatatatagccttctaaatgttcaagtgtgctctgtacagtgtttctagattgctttggtatgatataaagtggtaatcttgtgaatatgtatcatgttctaaattaaaaaccaa

SEQ ID NO: 449 - DNA, 1647 bp, Homo sapiens
  misc_feature: Incyte ID No: 427529.10
gcgttcctcctccggccccaggtcaccgccagcacgcgcctgcttcccgtctgcgcgagtccacgcagctccccaggcccttcaccagcacagcagcagcaggcatggcagcaagcgtggagcagcgcgagggcaccatccaggtgcagggccaggccctcttcttccgagaggccctgcccggcagtgggcaggctcgcttctctgtactgctgctgcatggtattcgcttctcctccgagacctggcagaacctgggtacactgcacaggctggcccaggctggctaccgggctgtggccattgacctgccaggtctggggcactccaaggaagcagcagcccctgcccctattggggagctggcccctggcagcttcctggcggctgtggtggatgccttggagctgggccccccggttgtgatcagtccatcactgagtggcatgtactccctgcccttcctcacggcccctggctcccagctcccgggctttgtgccagtggcccccatctgcactgacaaaatcaatgctgccaactatgccagtgtgaagactccagctctgattgtatatggagaccaggaccccatgggtcagaccagctttgagcacctgaagcagctgcccaaccaccgggtgctgatcatgaagggggcggggcacccctgttacctggacaaaccagaggagtggcatacagggctgctggacttcctgcaggggctccagtgaagcccagcactgctgcagggggtgggctgcctgcctgctctgagctctctcttgcacgctctctcttctctcccaggctctggctcatgcacatgcaacaggtgcgtctgtctatatgtctgggttcttgtcttttgtggtctgtttgtcttttctacctctttctcttgcagtgatagactgagggggtaaaatcaagagaaaaaactctcaggaatcaaggaacataatcctgtggagggtaatccattacatgagcttctcctgttcttccactttcctgcctggctttcactccttcccctgctctgcccagcctttccctcccacccactcctccttctgcaaatgccctgaaggccagcccttaccccaacacccacttccccacctccttaggccccagatacatacatgcccacatgcacgcttacatgtttagagccatccttgtttccaaatatgacccttcgcttgagggcaactgcataggtacatctaactctggactggcatgcacattgtcatgtgcagctttgcatatacacacatgcatacatgagcctccacacaagcacttgcacacatgtggactcctaaccatgctaacctcactggctgggaaggtggggaccccatgggccagcccttgcaggaggcccttttgcaaggcttagggtgtggccagccctgaaagctacttggacacaggtttcagctggccccagcccagaagtgacccccagaaagggagggccaccgctttgccccctgcttttacccttccttctgggtgctctacacctcaggttaccaggcctgaggcatctcagccaagcttgtttcctgctctgaggcttgtggggtgggagccagagtggaggtcggtgaaataaagtgatgcaattag

SEQ ID NO: 450 - DNA, 2449 bp, Homo sapiens
  misc_feature: Incyte ID No: 228579.1
  unsure 968-997, 1531-1552: a, t, c, g, or other
gccccagtccctgtctaaattgttatagtttttgactattatctgaattagtcttatccaaatttcatatgcagattgatttttcattttgtatgtatattacatgatataactattttcatagaatatatttctaatttacaaacactgaattattagcttgatagagtttctcccaaaccttataaaactttgaaatgtacttatgtttgagctttaaaaattataaaaacttcatttaaacaagttgctggcatcattactagcctttccacctataattatgatgcatttgatgccactgaacagtaatagcacaaagaacaggtcacacagtctagactggattgagttttaattaaacttcttcatccatagcctgataagaatcaggctgggtctagaagagttatcagactgtaggcctgtattaattttgcaagctaatgttaatgtttactgccagccttgcatagcaatgccagtttgcagttgtgactatgatgtgacttttggtaaaaatggtttatatctaaagtagtttagattttatggaagtggctcttgattgtttggacaagcagggtaggtaaatttcaattacgtttgaagtgtaattaaatcctagaatagagcactctccagaaaaaaaaatgaaaaaagaatttggagaatatcctggcatgaaaacttttttgaataatacgtagaattttgacaaggttcatacagtgcatacagtgtgaccttttctgaggtgggcagggagggttgctacgttgtgttgatttaaaatttcaaggaggaacaaaaacattctagccaaggagaattgcattgttatttttttttctactaatttaaacgtgcatttttcacagttacacatttaagttttgctaccaaaaatggccatttttctagacagataacattttcctaaagtggaagagagatccactgttctnnnnnnnnnnnnnnnnnnnnnnnnnnnnnnttgtgccttctcccttaaattataagaagagtaatagtaaaaacttgtttaaactatattttctttttttctaatccctctcagttctccttagatctgcctcctacaaatgatcatgttgtttgcatctgcctgattgagttcccttggtcaaacctctccctatcactatcagaagttgttcactaaatgtattttcctatttctttcatgttgattgactttataagtcaccttggtaaacataacatttggctaccttctcatgctttataaatgaatttgatgaatggcagtttttatattttaaccctttaaaaagtttgtcaaggaaacaactcagagctaagaacaaaatctaacttggaatcagtttcttcctttggctgctgaagcagcagcaagtcacgtaacctcatttagttttttgatttacaaaatgtggataataacctacctcacagatgtgtgtgagcaactgtttgaaagcccttgtttaaatacagggtttatatccccacattcaatgtaaannnnnnnnnnnnnnnnnnnnnngtatctttgatactgataggatgagtatcttgatttttaggtaagatcacagtttcacaaattgtggtgttgttaggtgacatttaatatttcttgagacctcaagtattcaaatatcaaacttgtcctgtgttgtaacaaatattcagaatctcttaaaatgttggctgaagctgccttaatgtaccaaaatacagctctcaagactgttcacaaatatctgtggttgtacaatgttttgaacatttaatgtaaagttgttgtagaactgtgaactctaaggatagtatctttattgttttaggaagaatggttgtgttctttgtcatgtatgcttaaatatacagtggattttgaatgcaacaaataaaactgaaaacagccatttggttgtgtcatgacaatcataatataggatataatatttactttttttcaaaaacatcctgcattcattcattcttagcatacctttgaaaaagaaaaaaaaatccataggttgatacattgacccattgaagtacttcattacgtatttattgaaaattttttttaattgttgaaattgggaccactttttataattggtttcaagaaaaaaaaatgaacagacttccagtgcttttctgttcaaataaactccgattcaaatttcagttttgtttgttatatactttttgtgagtgttaaatgatatgggaaggatttgtctttcattaaccatatggaaaagatgtcttcctgaattacatagcatttcatagttacagattcttcctaattaatgtttgcaccatatgaaactcataggtaacaaacacaaaggagaaaagcagcctgtctgattgcttataagcttttttcacaaaatcaaattaaaagtctctgattcatttg

SEQ ID NO: 451 - DNA, 3135 bp, Homo sapiens
  misc_feature: Incyte ID No: 481118.12
  unsure 497-585: a, t, c, g, or other
tgctgctgtgtctgtgacatctggtgctgctcatccccatccacaaactggaaaatgatttcctatgtaatcatgcatccaactgggctgtgctatttttttaaatgaaatctttggaattaagagaaaaacaagctgaaaaggaagaaaagcagaaaacaaagaaaatagaaacaagtgcagaaaagttgcgtaagctcttaaaagaagagaagaggtaaactataatattcagtatttttaaacttaaggcaactactgaattgaacccaaagtgccatactggaggtaaagtaaataaaaatatgaaagtatttcaagtgccaatcagtgactgttaagaatctttagcaaatatgtgttccatgtattttcttattaaagagatgaagtggaatttaaggctagaattctacaaaaaaagagtatcttagaattaaaatatagaataagttactttaattatgttttaggaagaaatattttagaactagagnnnnnnnnnnnnnnnnnnnnnnnnnnnnnnnnnnnnnnnnnnnnnnnnnnnnnnnnnnnnnnnnnnnnnnnnnnnnnnnnnnnnnnnnnctactgcatctagtgtataatggtcagggatgctcttaaacattctgtaatgcacaggtcagctcccacccgcacccccaccccctaccaagaattatttggctgaaaataccaataatcaggtgaagaaaccatgaactagaggtagccaaataaaaaagttgagttctcctttatgtgttcagtagtcttaagtttttaaggtagtgttgaaaaaagtctgtctttcagagatgatggatttgcttacaatgatacctgtctgcaagcattttttcccccaaaagtgcttaatagtaaaattagatcttgtagtagccgagattattgtatcatttatctgaaccacagcttttataaaatctttaaaggaaacaaatagggcccacatctttatgaataatttagaaacatttttgtatatatatgacaaatgaactgttttttttaggctaaagaagaaaagaagaaaatcaacttcttcttcaagtgtttcttctgctgatgaatcagtgtcttcatcatcatcctcttcctcttctggtcacaaaaggcataagaaacataagaggaaccgttcagagtcttctcgcagttccagaaggcattcatctagggcatcctcaaatcagatagatcagaataggaaagatgagtgctacccagttccagctaatacttcagcatcttttcttaaccataaacaagaagtggagaaactactggggaagcaggataggttacagtatgaaaagacacagataaaagagaaagatagatgccctctctcttcatcttcacttgaaataccggatgattttggaggtaggtctgaagatccaagagatttttataacagctataaaacccaagcaggtagtagcaaaacagaaaagccatataaatcagaaagacatttttccagtagaagaaattcctcagattccttctgtaggaattcagaggacaagatttatggttataggagatttgaaaaggatatagagggaagaaaagagcactatagaaggtgggaaccaggttctgtgaggcattctacctcaccagcaagctcagaatactcttggaagtcagttgagaaatacaaaaaatacgctcactctggatcacgtgatttcagtagacatgagcaaagataccgtttaaatacaaatcaaggagaatatgaaagagaggacaattatggggaggatatcaaaacagaggttccagaagaagatgcactaagtagcaaagaacactcagaaagcagtgttaagaaaaatttacctcagaatttactgaatatatttaatcagatagctgaatttgaaaaagaaaaaggaaataagtcaaaaaattaatacaccaaggatatcggcaccattacacaaaatgccattaagtgaagtttttggttgtattagtcataacagttgagtgcagaaatctctgcttctaaaattatttgtagagattacaggaaacaaatgcttttaagtaagtttttctcaaattttgtttcagttctaggtcccttgtcacagcttggtttttagactttttatgtatatgtttatgtacagtatattactcttgacagtttgaatttcttcacctaaagataattctctgaaagtactgtttcttcattctattgcggtatatgagaattcctgggtgcatcttattctgctgtttgagagaaaaatttgtgcattgaacacttggatcatttttataaaaattaatttcattttcttttctgttaaattaaaaatcgtcagcttttgaaagattatatgttcgaatgtttcttgaacacttttatatttatcagtttaaatattacattttttgcccaattttttttaaaatttttaaatggtagattatatgtcttaattttcctctaaagcccaatttgattaaaagtggtttgtgaacagtcattggcttccacccagcataagtgccttaggaataagatcataaaagttgaataggagcccattttgcttatttctccattattttttacctcattgctagcatagccataaaaagctttttaactttaaatatttacaaggcccttagggcctgtattccacgcaaggggtaaatcagaaaagaaaaaaatccttttagcaaaaacatagcagtagcagagaagcacattgtaaatctggcttttctttagggaaagaaaattgggagactctcctagtgtagcagatgttcagtccagaaggcactaggcatgtcgttaaatctgacctgcatttcttcttaccacctcctgtgccttgatgcttctctgatgacccctttctcagagtctgaataaataactagaccaactagagcctggttttactaagaataataaattccagcagctagagctgaagaacaaagagacttggattataaagatcctccccaaattgctgaaaatagtgtggtatattctttgggagacagatagagataggagtcataggtactgggtttatgatgtcattagagtatgcagtttaagattct

SEQ ID NO: 452 - DNA, 2782 bp, Homo sapiens
  misc_feature: Incyte ID No: 149914.32
cgacagtgggctgacaccttcattgtgtccctgcacaacttcctgagcgtcctgtttcagtgcatgccagtccctgtgatcctgaactttgatgcggagtgtcagaggactaaccaggttcaagaagaaaatgaagttctgcgtcagaagctttttgcattgcaagctgaaatccaccgactgaagaaagaggagcaacagccagaagaggaagaggccttggtccaacacaaattgcctccttatgtctccaacatggaccgcctgggggactcggaacttgccatggtgtgcagccaaaggaatgcctccctctcccagtcacttcgtgtgggcttcctgtcctcgctgctgcctcagagtaagaagagcccctcaaggttgtcgcctgctcagggccctcctcaacctcagagctcggccaagaaagagtccttcggtggtcagggcaccaagggaaaggacccgacgtccggagccaaggatgggaagagcctcctcagcgggctggccactggggagtccggttggtcacagcaccggcagcggcgcctgcaggaccatggcaaggagaggaaggagcttttctccacaaccacttcccagtgtgcagagaagaaaccagaagccagtggcccagaggctgagccctgcccagagctccacacggagccagtggagccactgactcgggcatcctcggcaggccctgagggtggaggagtccgccccgagcagccctttattgtgctgggacaggaggagtacgggggaacaccactcatccatcatgcactgcagagtggattgctctgggaggagagtcgccagcttagacgtagatggggtcatcaaagtgtggtccttcaaccccatcatgcagaccaaagcatcctccatttccaaatcaccgctgctgtctttggaatgggccaccaaacgggacagactgctcttgctgggcagtggtgtgggaacagtgcgtctctatgacacggaagccaagaagaatctctgtgaaatcaatatcaacgacaacatgcccagaatcctgtctcttgcgtgcagccccaacggggcctctttcgtctgttcggcagcagctccgagcctcacttcccaggtggacttctcagcaccagacatcggcagcaagggcatgaaccaggttcctggcaggctgctgctgtgggacacgaaaaccatgaagcagcagctccagttctccctggatccagaacccattgctatcaactgtacagccttcaatcacaacgggaacctgctggtcacaggggcagctgatggcgtcatccggctgtttgacatgcagcagcatgagtgcgcgatgagctggagggcccactacggggaggtctactctgtggagttcagctatgatgagaacaccgtgtacagcatcggcgaggacgggaagttcatccagtggaacatccacaagagtggcctcaaggtatccgagtacagcctcccctcagatgccacgggcccctttgtgctgtctggatacagcggctacaagcaggttcaagtccccaggggccgactcttcgcttttgactcagagggaaattacatgctgacatgttctgccacaggcggcgtcatctacaagctgggtggcgatgagaaggttctggagagctgcttgagcctaggtggccaccgagcccctgtggtcaccgtggactggagcactgccatggactgtgggacctgcctcaccgcctccatggatggcaagatcaagctgaccaccctcctggcccataaagcctgatgacttgccccaagggccacccgaggaagcagtattatctgcggtggggggaggagatataggacaggaaaaccacgtgctccactccagctccctgccagtgcagtgactctgcagggaaagactggcaaggaggctcaggtgcttccatctgtggtgactggaatgggacccacgtggagtaggtgacatatgcttcccagagactggtattgtggctgtgccaggagtacatgtgagactatgggaggaaagctccggaagaaggagaaacattgcagtggctactgtgttggcccagtagaaattgacagtattttgtatatatgtgcccatttatctttttcttttttaaaaaaagagaatactcttgtggtcccctgatgtctctttctaggatgtgtgtcactttgcttcagtgacagccctcccacccagcctggctctgctggccccgaactgaacctctccaggctctcctgttgctttgccatggagccaggtcagctctctgtctgttctgctgggtaacaaggtttggcagttcctgtttctctgggcttaagtcaaggccacagaattctttttcttccctgaaagctggcagcttttgttacagaagattctcaggatgaaggcaggggctgaggcctctgctactggctgcccctttccatccagtggctgctgtttcccaagacgggctaagcgtttcttatctgaaatgcttgggacaggagtgttacagattttggattttttcagactttggaatatttgcatatatacataatgaggtatcttggtaggtctcatgtctaaacatgaaattcattcatgttttatatataccttatacatgtagcctgaaggtaactctatacagtattttaaataattttgtacatgaaacaaagtattgattgtggtcaggtgtggtattttccacttgtggtgtcatgttggtgctcacagttttgg

SEQ ID NO: 453 - DNA, 1235 bp, Homo sapiens
  misc_feature: Incyte ID No: 1135179.1
cctggctgggcttctggcttcagagctgggaattgtgggaggagggcccagatcccactggagataccgaaggagatactctttagtattgggatcccagaaaccagtcctatatctggccagagggacactgggttgtggcatctctctagctgctacccagaaggaacagggccccctggggcctataggccttgcccctgaccctgggaacacccagctcaggcctgccccagtggccacaagtcagggaggccgcaaatttttaactagaaacattgatcattaatagggggttagaaagagttcaaactaagtctcactctgggacatagaccaattgtgcttcaggcctcctgcagagatgctgggtccccaagtctggtcttctgtgaggcaggggctaagcaggagcttgtccaggaatgtgggggtctgggcctcaggggaggggaagaaggtggacattgcgggtatctacccccctgtgaccacccccttcactgccactgcagaggtggactatgggaaactggaggagaatctgcacaaactgggcaccttccccttccgaggcttcgtggtccaggctccaatggcgagtttcctttcctgaccagcagtgagcgcctcgaggtggtgagccgtgtgcgccaggccatgcccaagaacaggctcctgctagctggctccggatgcgagtccactcaagccacagtggagatgaccgtcagcatggcccaggtcggggctgacgcggccatggtggtgaccccttgctactatcgtggccgcatgagcagtgcggccctcattcaccactacaccaaggttgctgatctctctccaatccctgtggtgctgtacagtgtcccagccaacacagggctggacctgcctgtggatgcagtggtcacgctttcccagcacccgaatattgtgggcatgaaggacagcggtggtgatgtgaccaggattgggctgattgttcacaagaccaggaagcaggattttcaggtgttggctggatcggctggctttctgatggccagctatgccttgggagctgtggggggcgtctgcgccctggccaatgtcctgggggctcaggtgtgccagctggagcgactgtgctgcacggggcaatgggaagatgcccagaaactgcagcaccgcctcattgagccaaacgctgcgaaaatcctttgagagaacatcccagtgtgggaactcct

SEQ ID NO: 454 - DNA, 2633 bp, Homo sapiens
  misc_feature: Incyte ID No: 020434.12
tcttgtttgtgcggctgaccagttggcgacatggtggcacccgtgctggagacttctcacgtgttttgctgcccaaaccgggtgcggggagtcctgaactggagctctggggcccagaggacttctggcctttggcacgtcctgctccgtggtgctctatgaccccctgaaaagggttgttgttaccaacttgaatggtcacaccgcccgagtcaattgcatacagtggatttgtaaacaggatggctccccttctactgaattagtttctggaggatctgataatcaagtgattcactgggaaatagaggataatcagcttttaaaagcagtgcatcttcaaggccatgaaggacctgtttatgcggtgcatgctgtttaccagaggaggacatcagatcctgcattatgtccactgatcgtttctgcagctgcagattctgctgttcgactctggtctaaaaagggtccagaagtaatgtgccttcagactttaaactttggaaatggatttgctttggctctctgcttatcttttttgccaaatactgatgtaccaatattagcatgtggcaatgatgattgcagaattcacatatttgctcaacaaaatgatcagtttcagaaagtgctttctctctgtggacatgaggattggattagaggagtggaatgggcagcctttggtagagatcttttcctagcaagctgttcacaagattgcctgataagaatatggaagctgtatataaagtcaacatctttagaaactcaggatgacgataacataagactgaaagaaaatacttttaccatagaaaatgaaagtgttaaaatagcatttgctgttactctggagacagtgctagccggtcatgaaaactgggtaaatgcagttcactggcaacctgtgttttacaaagatggtgtcctacagcagccaatgagattattatctgcttccatggataaaaccatgattctctgggctccagatgaagagtcaggagtttggctagaacaggttcgagtaggtgaagtaggtgggaatactttgggattttatgattgccagttcaatgaagatggctccatgatcattgctcatgctttccacggagcgttgcacctttggaaacagaatacagttaacccaagagagtggactccagagattgtcatttcaggacactttgatggtgtccaagacctagtctgggatccagaaggagaatttattatcactgttggtactgatcagacaactagactttttgctccatggaagagaaaagaccaatcacaggtgacttggcatgaaattgcaaggcctcagatacatgggtatgacctgaaatgtttggcaatgattaatcggtttcagtttgtatctggagcagatgaaaaagttcttcgggttttttctgcacctcggaattttgtggaaaatttttgtgccattacaggacaatcactgaatcatgtgctctgtaatcaagatagtgatcttccagaaggagccactgtccctgcattgggattatcaaataaagctgtctttcagggagatatagcttctcagccttctgatgaagaggagctgttaactagtactggttttgagtatcagcaggtggcctttcagccctccatacttactgagcctcccactgaggatcatcttctgcagaatactttgtggcctgaagttcaaaaactatatgggcacggttatgaaatattttgtgttacttgtaacagttcaaagactctgcttgcctcagcttgtaaggcagctaagaaagagcatgcagctatcattctttggaacactacatcttggaaacaggtgcagaatttagttttccacagtttgacagtcacgcagatggccttctcacctaatgagaagttcttactagctgtttccagagatcgaacctggtcattgtggaaaaagcaggatacaatctcacctgagttcgagccagtttttagtctttttgccttcaccaacaaaattacttctgtgcacagtagaattatttggtcttgtgattggagtcctgacagcaagtatttcttcactgggagtcgagacaaaaaggtggttgtctggggtgagtgtgactccactgatgactgtattgagcacaacattggcccctgctcctcagtcctggacgtgggtggggctgtgacagctgtcagcgtctgcccagtgctccacccttctcaacgatacgtggttgcagtaggattggagtgtggaaagatttgcttatatacctggaaaaagactgatcaagttccagaaataaatgactggacccactgtgtagaaacaagtcaaagccaaagtcatacactggctatcagaaaattatgctggaagaattgcagtggaaaaactgaacagaaggaagcagaaggtgctgagtggttacactttgcaagctgtggtgaagatcacactgtgaagatacacagagtcaataaatgtgcactgtaatggacttaataactacatgcttgcagtcactggtatcttaaaatattatcatgtaaacaggtcatctttaccttcataactgaattgagtttctgggttttttttttttttgagatggagt

SEQ ID NO: 455 - DNA, 3254 bp, Homo sapiens
  misc_feature: Incyte ID No: 232928.5
gccggaagaccgtcccggatggcctcggggactgccagtgtgtggaggtgagctccgggattgccggcattcccgcttctgctggttgcttcatgctgcaggctgcggccgtcagccctcgctcgcattggtggcgctgaggtgccggggcagcaagtgacatgtcgtcgggcctccgcgccgctgacttcccccgctggaagcgccacatctcggagcaactgaggcgccgggaccggctgcagagacaggcgttcgaggagatcatcctgcagtataacaaattgctggaaaagtcagatcttcattcagtgttggcccagaaactacaggctgaaaagcatgacgtaccaaacaggcacgagataagtcccggacatgatggcacatggaatgacaatcagctacaagaaatggcccaactgaggattaagcaccaagaggaactgactgaattacacaagaaacgtggggagttagctcaactggtgattgacctgaataaccaaatgcagcggaaggacagggagatgcagatgaatgaagcaaaaattgcagaatgtttgcagactatctctgacctggagacggagtgcctagacctgcgcactaagctttgtgaccttgaaagagccaaccagaccctgaaggatgaatatgatgccctgcagatcacttttactgccttggagggaaaactgaggaaaactacggaagagaaccaggagctggtcaccagatggatggctgagaaagcccaggaagccaatcggcttaatgcagagaatgaaaaagactccaggaggcggcaagcccggctgcagaaagagcttgcagaagcagcaaaggaacctctaccagtcgaacaggatgatgacattgaggtcattgtggatgaaacttctgatcacacagaagagacctctcctgtgcgagccatcagcagagcagccacgagacgctctgtctcttccttcccagtcccccaggacaatgtggatactcatcctggttctggtaaagaagtgagggtaccagctactgccttgtgtgtcttcgatgcacatgatggggaagtcaacgctgtgcagttcagtccaggttcccggttactggccactggaggcatggaccgcagggttaagctttgggaagtatttggagaaaaatgtgagttcaagggttccctatctggcagtaatgcaggaattacaagcattgaatttgatagtgctggatcttacctcttagcagcttcaaatgattttgcaagccgaatctggactgtggatgattatcgattacggcacacactcacgggacacagtgggaaagtgctgtctgctaagttcctgctggacaatgcgcggattgtctcaggaagtcacgaccggactctcaaactctgggatctacgcagcaaagtctgcataaagacagtgtttgcaggatccagttgcaatgatattgtctgcacagagcaatgtgtaatgagtggacattttgacaagaaaattcgtttctgggacattcgatcagagagcatagttcgagagatggagctgttgggaaagattactgccctggacttaaacccagaaaggactgagctcctgagctgctcccgtgatgacttgctaaaagttattgatctccgaacaaatgctatcaagcagacattcagtgcacctgggttcaagtgcggctctgactggaccagagttgtcttcagccctgatggcagttacgtggcggcaggctctgctgagggctctctgtatatctggagtgtgctcacagggaaagtggaaaaggttctttcaaagcagcacagctcatccatcaatgcggtggcgtggtcgccctctggctcgcacgttgtcagtgtggacaaaggatgcaaagctgtgctgtgggcacagtactgacggggctctcagggctgggaggaccccagtgccctcctcagaagaagcacatgggctcctgcagccctgtcctggcaggtgatgtgctgggtatagcatggacctcccagagaagctcaagctatgtggcactgtagctttgccgtgaatgggatttctgaagatttgactgaggtctctcttggcctggaagaataacactgaaaaaacctgacgctgcggtcacttagcagaggctcaggttcttgccttgggaaacactactagctctgaccttccatacctcacttgggggagcacagggccccgctgggcctcctcaccaacggcagtgccaaaatcagcccccacatcaaggtggtgttctctgtgctttctctcgtccttccaaagtcggttctggcctaacgcatgtcccaacaccttgggttcatttgcccggtgaactcactttaagcattggattaacggaaactcccgaactacagacccctccctggtgggttgcatgaatgtgtctcattactgctgaaatgtcctcacatctcttccactgttcttcagagctttctggctctctttcccccacaaaattcgacacatttaaaaatctccgtgtggctttaaaaaatggttttttgtttttttgtttttttgaggtgggagaggatgtgtgaaaatcttttccagggaaatgggttcgctgcagaggtaaggatgtgttcctgtatcgatctgcagacacccagaaggtgggtgcacactgcatgcttgggggtgccaagggattcgagacctccaacatacttgtctgaaggtggtgattctggccatggcccctctgccaagcctgtgtgcgatgcccttggtgctttagtgcaagaagcctaggctcagaagcacagcagcgccatctttccgtttcaggggttgtgatgaaggccaaggaaaaacatttatctttactattttacctacgtataaagttttagttcattgggtgtgcgaaacaccctttttatcacttttaaatttgcactttattttttttcttccatgcttgttctctggacatttggggatgtgagtgttagagctggtgagagaggagtcaggtggccttcccaccgatggtcctggcctccacctgccctctcttccctgcctgatcaccgctttccaatttgcccttcagagaacttaagtcaaggagagttgaaattcacaggccagggcacatcttttatttatttcattatgttggccaacagaacttgattgtaaataataataaagaaatctgttatatacttttcaagaaaaaaa

SEQ ID NO: 456 - DNA, 538 bp, Homo sapiens
  misc_feature: Incyte ID No: 1035717.1
ggatctggggtcagatcatggaagggtctttgcaggacccttaggttgggtccatccccatgggcatttctgtggttcacagacctcatgcctgagaatgtggtagaggaaaagaccaaggccatggacctccatgcagtgttggctgagatgccccagccccatggacccccaatgcagtggcggtactcagaggtttccttcttggagctggacaaattcctagaggatgtcaggaatggcatctatccactcatgaatttcgctgctgctcggcccttgggacttcctcgtgtgttggccccacccccagaggaggcccaaaaggccaaaactccaaccccagaaccctttgactcggagaccaggaaggtggtccagatgcagtgcaacctggaaagaagcgaggacaaggctcggtggcaccttactctgcttttggtgcttgaggaccggttacatcggcagctgacctatgatctgctcccaaccgacagtgcccaggacctcgccgccgaactagtgcactatggcttcc

SEQ ID NO: 457 - DNA, 460 bp, Homo sapiens
  misc_feature: Incyte ID No: 1346179.1
ttttgtctttgttatcttctagggacaggtgtgaggccttcctggtcttttgtcacttgctgcttactaaggcacacttcagccctgaccgtggcagagcaggccaggctgaaggcttcgctgtaccttcctggccgactttgcatcctgtgttctttgctaccttaaacctatgtccacagttcttgggcgccagcccagaggtcaggaggaggtgacaccaggtaggcatgctctggtggcagcagcaccaccgagagttgcccacctagtgtcacatgatacacaaggtcagtaggtggcatcaagcccacctcctgtagaagaggctagcaggactaaggagccatgttagcagtggcattctagtgtccctgggaatgcagaatctcctgtgtgctgcccctggccagagctgtcctcagcctgtctcagagatgcatgctcctctcccttagca

SEQ ID NO: 458 - DNA, 580 bp, Homo sapiens
  misc_feature: Incyte ID No: 1002701.1
cacgccctcaaaggctccgcctctgctgcttgaatcccacccctctatctgcaggaccccgagccgtaatgatcctgcaacagcccctggagcgaggccccccaggtcgggacccacgggccaccactggggtgactcttggcctggataccagggaacccttgcacaagcacttcctgtctgaggagaacatggccacccatttctcccgactcagcctacataatgaccacccctattgcagtccccctgtgacttttcccgaagccctgccaccactcaggagcccttgccaccgagctgcttctctggcgctatcccgggagcctgattcctgaggccctccggctgctgaggctgggggataaccccagtccctactactctgcgtccccagctggggagatcatggagctctgagtgtcgatgacctgtgtcccacgtccccacctttttcctgactatagagaccagcaactcccagaaagggatgcaggcttctccaaacccggtggcctggcaccaggaccttcccctgacaggaggacactgagctcggtggaacgttagattcgaagca

SEQ ID NO: 459 - DNA, 3154 bp, Homo sapiens
  misc_feature: Incyte ID No: 232376.7
gccggctgcgccatggcgttggcgttggcggcgctggcggcggtcgagccggcctgcggcagccggtaccagcagttgcagaatgaagaagagtctggagaacctgaacaggctgcaggtgatgctcctccaccttacagcagcatttctgcagagagcgcagcatattttgactacaaggatgagtctgggtttccaaagcccccatcttacaatgtagctacaacactgcccagttatgatgaagcggagaggaccaaggctgaagctactatccctttggttcctgggagagatgaggattttgtgggtcgggatgattttgatgatgctgaccagctgaggataggaaatgatgggattttcatgttaacttttttcatggcattcctctttaactggattgggtttttcctgtctttttgcctgaccacttcagctgcaggaaggtatggggccatttcaggatttggtctctctctaattaaatggatcctgattgtcaggttttccacctatttccctggatattttgatggtcagtactggctctggtgggtgttccttgttttaggctttctcctgtttctcagaggatttatcaattatgcaaaagttcggaagatgccagaaactttctcaaatctccccaggaccagagttctctttatttattaaagatgttttctggcaaaggccttcctgcatttatgaattctctctcaagaagcaagagaacacctgcaggaagtgaatcaagatgcagaacacagaggaataatcacctgctttaaaaaaataaagtactgttgaaaagatcatttctctctatttgttcctaggtgtaaaattttagtagttaatgcagaattctgtaatcattgaatcattagtggttaatgtttgaaaaagctcttgcaatcaagtctgtgatgtattaataatgccttatatattgtttgtagtcattttaagtagcatgagccatgtccctgtagtcggtagggggcagtcttgctttattcatcctccatctcaaaatgaacttggaattaaatattgtaagatatgtataatgctggccattttaaaggggttttctcaaaagttaaacttttgttatgactgtgtttttgcacataatccatatttgctgttcaagttaatctagaaatttattcaattctgtatgaacacctggaagcaaaatcatagtgcaaaaatacatttaaggtgtggtcaaaaataagtctttaattggtaaataataagcattaattttttatagcctgtattcacaattctgcggtaccttattgtacctaagggattctaaaggtgttgtcactgtataaaacagaaagcactaggatacaaatgaagcttaattactaaaatgtaattcttgacactctttctataattagcgttcttcacccccacccccacccccaccccccttattttccttttgtctcctggtgattaggccaaagtctgggagtaaggagaggattaggtacttaggagcaaagaaagaagtagcttggaacttttgagatgatccctaacatactgtactacttgcttttacaatgtgttagcagaaaccagtgggttataatgtagaatgatgtgctttctgcccaagtggtaattcatcttggtttgctatgttaaaactgtaaatacaacagaacattaataaatatctcttgtgtagcaccttttactgtagattagtgcttaatttcttggcttgcatttgttgattgctaaggcaattttttctaatcttagggaatcattcagtagatgcgattaaaaaactaatgttgggtcaatttttttcttcattttcagcacaagaagtcctcttatatcctactaaatacattcctaaaaatgtatttgaacattggttctgtaaaagataatggactaaaaaagtagagaggagttgtagagatcttaaatcattctggaattcctaattatgcttcaatttttagacataattttagataatttatttccagtgttttctgcatgttctcatttgttctttttctcagttgaatgcaccaactggtttgagtcctgtgagcattcagtcagttgaaattaaagattcctcatttctcctgatttctattcttgtctcaatcttaaatttagagaccagttgtttttatgatatcagccatttgatttttttcattttctatttaagaaatatgaagaaaaaatacaccaagatggtcaaattactacacaaatcagcaccagcacagtctgatagctgcaaatgtccattcatctgctgtgtatgtatatccagaatcagcataggaagtcgttcaggatatcagtatataatgcacagaagtgtgggttgtttgaaagccaaacaggaaaattaggagcctcctggattgacatttcaatgatccctctaaccagtttatggattattatgaataatagtgtagtgtgttctttttcagaagttatatttgataatagagaagggagttttatggaagtttctttgaagatttttttttttccatttcgaatcagattatagcaacaatggagtttggaagtttgtatggcctataatgttctaagttccagaatgaaaagatctgtaacaatctgaatagatgtggacacatatagcagagagaactatgtaaattatcttgcagaacaaaatagaagggtcctaaatcacgttaactcaaacattgtagactagctttgtgtttattcttcaggtccttgcgccttatttggttttgtatattcaacgaactgaaatatttggaattcctatttctacgtatttggtggtccataagactttgtcaaatgtaaacctacagtttgataagctttaaaatacctagttaagaggatgatttctctttaatcgtttaaatgttctgaaaattaaaatcttttgaggcacatgaagtgggcaccatatatcatctagagtccttactggtattcaggatgaaaatgttcacgctgcattaattgtcatttttctctcccatgttctttctcactttgatacgttaatactgataatggataaagagtgagtttttataataaaggttttggaaagtatcataggaac

SEQ ID NO: 460 - DNA, 1588 bp, Homo sapiens
  misc_feature: Incyte ID No: 1383610.2
gtccgcggtcgcgccgggctccgcctgcagtgtggcccgtccggacagtccctcaccccggcctgcgctgctgcgtggactcgggcctcaggaattccgctgcggcccaaggcttgccgtttgacgaggagcagtcgcggtaggcggtgggcaaggctgccctgggcggaggccgaggcgcggctcggactccagcatggcgaccgcggtgcgcgctgtgggctgcctccccgtgctgtgtagcgggacggcaggtcatttattggggaggcagtgttccctaaacaccttaccagcagcttccattttggcatggaagagtgttctcggcaatggccatttgtcatcactgggaaccagagacacccatccctacgccagcttgagccgtgcactgcagacacaatgctgtatttcttctcccagtcacctgatgagccagcagtatagaccatatagtttcttcactaaattgactgcagatgagctgtggaaaggcgctttagcagagactggtgctggagcaaaaaaaggaagaggcaaaagaactaaaaagaagaaaagaaaggatctgaacaggggtcagatcattggtgaagggcgttatggttttctatggcccggactgaatgtccctcttatgaaaaatggagcagtgcagaccattgcccaaagaagcaaggaagagcaggagaaggtggaggcagacatgatccagcagagagaagagtgggaccgaaagaagaagatgaaggttaaacgggagcgaggatggagtggaaactcatggggaggcatcagtcttggcccccctgaccctggtccctgtggagaaacatatgaggattttgataccaggatacttgaggtaagaaacgttttcactatgactgcgaaagagggaagaaagaaatcgatccgtgtcttggtggctgtggggaacggaaaaggagctgcaggtttttctattgggaaagctactgatcggatggatgctttcaggaaagcaaagaacagagcagttcaccatttgcattatatagaacgatatgaagaccatacaatattccatgatatttcattaagatttaaaaggacgcatatcaagatgaagaaacaacccaaaggttacggcctccgctgccacagggccatcatcaccatctgccggctcattggcatcaaagacatgtatgccaaggtctctgggtccattaatatgctcagcctcacccagggcctcttccgtgggctctccagacaggaaacccatcaacagctggctgataagaagggcctccatgttgtggaaatccgggaggaatgtggccctctgcccattgtggttgcgtccccccgggggcccttgaggaaggatccagagccagaagatgaggttccagacgtcaaactggactgggaagatgtgaagactgcacaatattccatgatatttcattaagatttaaaaggacgcatatcaagatgaagaaacaacccaaaggttacggcctccgctgccacagggccatcatcaccatctgccggctcattggcatcaaagacatgtatgccaaggtctctgggt

SEQ ID NO: 461 - DNA, 1217 bp, Homo sapiens
  misc_feature: Incyte ID No: 410014.14
  unsure 601, 613, 1206: a, t, c, g, or other
gcccgggcgcgcggcaggtgcggcggcgcaactcgcgggtaggcgaccgctggtcccgccgctgaggcccctccactgccgcccgcccggcaccccctccgggccgccgtggcccgcgccaaacctgagcgtctcggtcgggaactccggttaccccctcggggcgcaaggcggcagggcacctgaaggccaggctgaggccccctgctctcatggccagccctggaaagcctggggctgatgaggcccaggaggaggagggggaactcgaggggggctctgcagggccgcgggctgcaatactggagcaggctgaggagctgtttctgctgtgtgacaaggaggctaagggcttcatcaccaagcacgacctgcagggtctccagagcgacctgcccctcacgccagagcagctggaggctgtgtttgaaagtctggaccgggctcacactggcttcctcaccgccagggagttctgcctgggcctggggatgtttgtgggggtggcgtcagccagggagcgaacccctgcaggactcccgaggagacctttgagtcgggcgggctcgacgtgcagggcacggcgggctctctggatgangaggaggaagangaggagcgattccacactgtgctggagcagctgggggtggccccggtcctgggcaagcagcgggctgtgaggacgctctgggccaggctgcagcgcgagcgccccgagctgctgggctctttcgaggatgttctgatacgcgcgtcggcctgcctggaggaggcggcccgggagcgcgacggcctggagcaggcgctgcggaggcgcgagagcgagcacgagagggaggtgcgcgctctgtacgaggagacggagcagcttcgggagcagagccggcgcccgccgagtcagaacttcgcccgcggggagcggagaagccgtctggagctggagctgcagagccgcgagcaggacctggaacgcgcgggcctgcggcagcgggaggtgagcacccggcccctgccctgtccccacggtcacccgtgcactctccccctgtgccttagcgtccccgggttgtcgggagcctggggcacgcgcagaccccggggaagagggggcgttcctcgccggtctccatccttccaccctccagttagagcagcagctgcacgcccaggctgcggagacctggaggcacaggcccagaactnccagctgtggc

SEQ ID NO: 462 - DNA, 2281 bp, Homo sapiens
  misc_feature: Incyte ID No: 410014.15
  unsure 1147, 1165, 1373, 1932-1952: a, t, c, g, or other
gcggggcgtccgcgcaaggaggtgggaagggaggccccagggagttctgaaacggggaagggccttagtgttgtggggcaagggtgttaggtctcgaatctgaaagtgttcctgagtggggcgtcagaggcgaagggctccgcaggctgggaccttgcgcctgcactctgtgggctcagttgtggggagggaggggccggtgggcaggagggagaagtctgccctgcctgccagctgtcatgaggctgggccacacaggcccaggccaggggctaaggacttggtcaggactggctgagccctcacttgggatcagatctccagttgcagagtgtgaggggctcctccctcactgaccccaagcctgctcctctcagctttcaggaccccaccttccttatcaccaggtcttctccactggcccctgagattgccatcacctccagctcctcctctcctgaagttggcagcccctcctgggttccagcctcctgagatgccagacccactggggcagtacccacaggccctgagcctacatcaaccaccccagtgacaccccaagcctgcagcattttccacccccagccccctggtcccaccttgccttccgcccaccttcccacctgactgcagggagggccctcggctgagccttcagacacacttgcaccccataccgctcccctcctgaatttcttctgaccctcccttggcttcacagcacctgaaggccaggctgaggccccctgctctcatggccagccctggaaagcctggggctgatgaggcccaggaggaggagggggaactcgagggggggctctgcagggccgcgggctgcaatactggagcaggctgaggagctgtttctgctgtgtgacaaggaggctaagggcttcatcaccaagcacgacctgcagggtctccagagcgacctgcccctcacgccagagcagctggaggctgtgtttgaaagtctggaccaggctcacactggcttcctcaccgccagggagttctgcctgggcctggggatgtttgtgggggtggcgtcagccagggagcgaacccctgcaggactcccgaggagacctttgagtcgggcgggctcgacgtgcagggcacggcgggctctctggatgangaggaggaagaggaggancgattccacactgtgctgggctctttcgaggatgttctgatacgcgcgtcggcctgcctggaggaggcggcccgggagcgcgacggcctggagcaggcgctgcggaggcgcgagagcgagcacgagagggaggtgcgcgctctgtacgaggagacggagcagcttcgggagcagagccggcgcccgccgagtcagaacttcgcccgcngggagcggagaagccgtctggagctggagctgcagatccgcgagcaggacctggaacgcgcgggcctgcggcagcgggagttagagcagcagctgcacgcccaggctgcggagcacctggaggcacaggcccagaactcccagctgtggcgggcgcacgaggcgctgcgaacgcactggagggggcgcaggagcagatccgcaggctggagagcgaacacgaggccgccaggagcaaacccaacggtgccgtgggacggggctgggcgggccccggtgcgtgtcccgggggcggggccgacgggcgctcaggtctgggccactttcatccccatttcaagtcccaggcccgccccgtgggaaggaggatcttctagggggtccgggggctccccaaggagccttcctgcagccgggtcaccacctcccatccacagagacgtggtcgccgtctccaggaacatgcagaaagagaaagtcagcctgctacggcaactggagctgctcagggagctgaatacacggctgcgggatgacagggacgcctgcctgggcccacnnnnnnnnnnnnnnnnnnnnnggctcggccccccagacgcggctctggccaccttcccagtgcccggtgaccagccccgagtgactcacggaccatgagctagaagctgcccttgcaggaggcttgtcatgggtcgggggtgcccactcaggatgcaggctctccccagggggccccaggctcgcctgactgaagacatgaaggacctagcctaggagtggtcagggtcccgggagtggccagggtcccgtgtgtgccctctgccagtcttcgctctgtccccgttcaatcaaccccatctcagttcagcagaaaaccccctcgtcaaataaaacccactgactgcaaaa

SEQ ID NO: 463 - DNA, 4855 bp, Homo sapiens
  misc_feature: Incyte ID No: 1326983.14
  unsure 4800, 4805, 4813, 4816-4817, 4822-4823, 4831-4832, 4835, 4837,4839-4840, 4849-4850: a, t, c, g, or other
cgacgccgccgccttagaacgcctttccagtactgctagcagcagcccgaccacgcgttaccgcacgctcgcgcctttcccttgacacggcggacgccgggaggattggggcggcaatttgtcttttccttttttattaaaattatttttcctgcctgttgttggatttggggaaattttttgtttgttttttatgatttgtattgactgagagaaacccactgaagacgtctgcgtgagaatagagaccaccgagtttcgcaggccgactcgcggggccgctgcacccaccgccaaggacaaaaggagcccagcgctactagctgcacccgattcctcccagtgcttagcatgaagaaggcccgaaatgggacgattcagtatttccccgggatgaagacagcagcaagctacagttccaacagcgacttcaactactcctaccccaccaagcaagctgctctgaaaagccattatgcagatgtagatcctgaaaaccagaactttttacttgaatcgaatttggggaagaagaagtatgaaacagaatttcatccaggtactacttcctttggaatgtcagtatttaatctgagcaatgcgattgtgggcagtggaatccttgggctttcttatgccatggctaatactggaatgctcttttataattctctgacatttgtgtcaatatttccctgtattctgttcatctcctttgaagactgccaatgaaggagggtctttattatatgaccaattgggatatacaggcatttggacttagttggaaagcttgcagccatcctggatcaattacaatgcagaacattggagctatgtcaagctacctcttcatagtgaaatatgagttgcctttggtgatccaggcattaacgaacattgaagataaaactggattgtggtatctgaacgggaactatttggttctgttggtgtcattggtggtcattcttccttgtcgctgtttagaaatttaggatatttgggatataccagtggcctttccttgttgtgtatggtgttctttctgattgtggtcatttgcaagaaatttcaggttccgtgtcctgtggaagctgctttgataattaacgaaacaataaacaccaccttaacacagccaacagctcttgtacctgctttgtcacataacgtgactgaaaatgactcttgcagacctcactattttattttcaactcacagactgtctatgctgtgccaattctgatcttttcatttgtctgtcatcctgctgttcttcccatctatgaagaactgaaagaccgcagccgtagaagaatgatgaatgtgtccaagatttcattttttgctatgtttctcatgtatctgcttgccgccctctttggatacctaacattttacgaacatgttgagtcagaattgcttcatacctactcttctatcttgggaactgatattcttcttctcattgtccgtctggctgtgttaatggctgtgaccctgacagtaccagtagttattttcccaatccggagttctgtaactcacttgttgtgtgcatcaaaagatttcagttggtggcgtcatagtctcattacagtgtctatcttggcatttaccaatttacttgtcatctttgtcccaactattagggatatctttggttttattggtgcatctgcagcttctatgttgatttttattcttccttctgccttctatatcaagttggtgaagaaagaacctatgaaatctgtacaaaagattggggctttgttcttcctgttaagtggtgtactggtgatgaccggaagcatggccttgattgttttggattgggtacacaatgcacctggaggtggccattaattggcaccactcaaactcaaactcagtccatctgatgccagtgttgagtaaactcaactactatgaaatttcacctaatgttttcagtttcacttccttttgaagtgcagattcctcgctggttcttctgagtgcagaataagtgaacttttttgttttgttttgtttttttaagaaacttatctgtatgttagaaatggatatgaacaacaaaaccacgagtctcgggttaagggaagtgacaattttattccattccagagaatggacaaactcttaacttttatcaagccacatgcttggctgtgtcattgtttaacttggatattttatgattttacttgaatgtgcctaatggaaccatttgatgtgagaaacaattctttttaatttacagcaaaatattgaataaccattgacaaaaacactattattttttgtaccaaaaatacttaaagacctcagaagcactcttttacttttaagaaattgcttttttgaactttattcagaagcagttatcaataaattccataaaataatgtcattggtatttaaaaatgaatattaatataatgaaatggtttgcctttttgtaggcataataagccaaatacttttttacccaaaataatttttagagaaaatgatgtaatgaaaaattgtaccatgaattaggagcatagttttttccatttaaacgtcaccattacttaaaagatgattgattattgctataccaaatcagatgaactctgttcatcacttttcttctctgtccccaaacaatttggttcattcagactgaaatgtttgtgtcttcaacttattagaatggaagataatgcagatatttctgtgggaaataaaataactaattttgaggtaccaaatagtgcaattgggtaaaacagggtttattcagttgcatctgtctccagtgttgtattgacagctctgggtctttttttgggccagcccttttttgacattgcttccagcagtggaaaatgggcatttgatggcaataggccaaaattattgtgtccagagagtacactttttcaaaatgctcacctactggaagtgtgaattacttgacaatgtatggcttagttgtgttcatgttttgtctacagtagaggtctaatccacaggttacacctatgtttgatatgatataagttctctttgcgtaggccactgggtttctcatgcagtaagctttataaaaactcatttgcactggactgtcatctcattcttgtacaacgtagaattacttgtttacatccaacaaatggttagctagggaaaacagtgcaaactgagtgttagtagtcattttggtccaactgcatgtcaacccttccatttcaatcccagttagaaatgaaaataattactttgaaacttggctttaagagcacatttatcgtacgtcacagtgtatggtgaatatattattaaataatgtggtacttcgctcatcaggcataatgtctaaaatctaatatacataattccattaagtggttgaaggaagcaaataatggaattgtcaattggtcatctggctgtaaggtttgcccttgaactaaaaatgttgtttggggcaagggccagaaatgtggagacatggtttttgttacgcattcttgtattatatgtgactaaatttacaaacaagatacatgtgtaattaaagacccttatggaactggaagacgtcttgtagtgctacattgggtgaaaccgttggtccatttttgtctgtttctatgaagataaaataattgggggccatctagaaatagaaaggcagtgggaagacagattctacggcactgctttcatttaattgggctttaggcactccattcgaatgcagaacctcacctctagttgagaccaagaattggcaaatttgcatgagctcctggaaagagttgctgactttgtatctaagacctgccagggaataccaagagttgtttctacagactttttttttttttttgtatgggagaagatactgtggcaaccaggaaggaatggaaaaaaaattcttttctctacagcaaattaatgtgaggaagctcctccaatcctctggctatttaaggttcaaaatcaagtgcctagggaaaattccaatggatgattttctgggagctatcttgtctaccttgaggttcctgaacaatgaattcccattaatgagcagtcttcagtattaaaaccactgtcttgtcacctcattttgcattactgtcttccgtggatgtttcagttacaactgtaatgttatttatagaacaacattaatccattaaagctaacctatttttcaatatttatgataatctatgtacatatattgtctgtccatatgtatttgtaaataggttgtatataatgtcaggtttgggtcttgggttcaagtgtatatattcctgtaagtttcttaactgcattttgatgaattcacattatgtaactataagaattgtcccaaaagtacctgtacagaaaattgaatattgaaaaattgacaaattgtgtacaaacactaaaaaaaacttgtttaaattgtatttgcaataaacaacatcaaattttttcatgaaatcttggtacaaattcagatctcttatttaaaatttaaataaggaatacattttcaaaatgcagtaatcaaaatgtgatctagtgtaatgaaataaaatgtgatctagtgtaatggaagacctttgagaacctgggtgtattaactttgtgtatatagtgtaaatatccccactgtactgttagaggccaacaattctagtatggcttgttggcaaagagtgctacaccgtttcaatgaaacaatgtatgtttgttttaactgaactaaaataaatacatgcttaatcctgaaaaanaaaanaaaaaaanaannaaaannaaaaaaannaangngnnaaaaaaaannggggg

SEQ ID NO: 464 - DNA, 258 bp, Homo sapiens
  misc_feature: Incyte ID No: 1166953.1
caatggatgattttctgggagctatcttgtctaccttgaggttcctgaacaatgaattcccattaatgagcagtcttcagtattaaaaccactgtcttgtcacctcattttgcattactgtcttccgtggatgtttcattacaactgtaatgttatttatagaacaacattaatccattaaagctaacctatttttcaatatttatgataatctatgtacatatattgtctgtccatatgtatttgtaaataggttgt

SEQ ID NO: 465 - DNA, 1597 bp, Homo sapiens
  misc_feature: Incyte ID No: 244999.5
ctttcttttttgggccctcataataagcattgttactattggaagttgttttcacattctttccaatattaaatatgtatttttttaagtaatgataatattttccagtggctcatttggatgagaactaccctctatttttaatattaaaactacatccaactcatcatttagcctttggttgtacagttgtgtaatgggctatggactgttacacaccttaccacctctaggcctatgttttttctttccccatatattctgatggggataaatactgttttgcctctcccataggaatggaatacatttattctaaaatgatctttcacagaagtaagagagagggaaacctaaatatacctctaaattgtttgaagttggtcccagcagcataaaatgggttggccccaaagggttggagggtgggcttggttatcagtatttgttttcagaatgagatgggagcatctttcctttgccacgtgctttgtgcttgataacatcatgcttggttcaaacgacaactcagcacaaagccttgagtataaattgttggaatcaaaacatctcattctgatgacgtggtttaattttttaattttttttttaataggggtgggagggagggtactttgccccaaaagggagggtgtctgcactaaggatttagaaacactttggaagctcataacctcatcagaaactgcctttagccacactcctgaccttctagatgagtaacaaaaaaatgaaataagttcttggaaattaagccatttattttaatttgctatttttttcaatgttctaggtatctttaaatttgttattgtggaatcattttcctgccagatacctttatcaaaattattggcctcatgagagctgaagtaagtcagctttttggtgaactttagtggacttctgtgagattgtagttgtactttgtatctctaaatctaaagatagttttttaaaactcccaaagaaaatctgctctcctttctgatctaaaaactcatctttggggtaaagagttaagtgtccaaaggttgtcacagttcatgaggtcagagggagctagcctggcacctggactctgcccatccacagctgacagattccaacagaagtgtatttaaattctccagtagacaatgctgggtaagggagggggtagggctgggttattaagatacaggctgctgtattttacattggttgtgggggaaggggagcctggagaaaacaaagtcactattcccttttttgaaacaggaaaaaaaattattttttgttcagtaaaaatggtagagaattccaatgtccctagccacaagggaccagttccactgagaagtgaacagtgggaactcaaaatttcagaaacattgggggaagggaaaattggctttctcttaattggcagatgttccagtggggcgggggggctctgtttttgttgggatgtgttatgttgtatgtacgcatatatggaccggagtctgctgagtttataaggttccaaaaatatggtaaaatcttggtttttgttaatttatctcaataaaagcccactggaactccaaaaaaa

SEQ ID NO: 466 - DNA, 1718 bp, Homo sapiens
  misc_feature: Incyte ID No: 239501.1
  unsure 997: a, t, c, g, or other
cgcttccggggccgggcttgctcgcgcgtgcgcaccagaagccagcagtggggttgcacacgcgcctcttcacgaggtggaaacaagatggaggattcggcctcggcctcgctgtcttctgcagccgctactggaacctccacctcgactccagcggccccgacagcacggaagcagctggataaagaacaggttagaaaggcagtggacgctctcttgacgcattgcaagtccaggaaaaacaattatgggttgcttttgaatgagaatgaaagtttatttttaatggtggtattatggaaaattccaagtaaagaactgagggtcagattgaccttgcctcatagtattcgatcagattcagaagatatctgtttatttacgaaggatgaacccaattcaactcctgaaaagacagaacagttttatagaaagcttttaaacaagcatggaattaaaaccgtttctcagattatctccctccaaactctaaagaaggaatataaatcctatgaagccaagctccgccttctgagcagttttgatttcttccttactgatgccagaattaggcggctcttaccctcactcattgggagacatttctatcaaagaaagaaagttccagtatctgtaaaccttctgtccaagaatttatcaagagagatcaatgactgtataggtggaacggtcttaaacatttctaaaagtggttcttgcagtgctatacgtattggtcacgttggaatgcaaattgagcacatcattgaaaacattgttgctgtcaccaaaggactttcagaaaaattgccagagaagtgggagagcgtgaaactcctgtttgtgaaaactgagaaatcggctgcacttcccatcttttcctcgtttgtcagcaattgggatgaagccaccaaaagatctttgcttaataagaagaaaaaagaggcaaggagaaaacgaagagaaagaaattttgaaaaacaaaggagaggaagangaagaggcagcaggctaggaagactgcatcagttcttagtaaagatgatgtggcacctgaaagtggtgatactacagtgaagaaacctgaatcaaagaaggaacagaccccagagcatgggaagaaaaaacgtggcagaggaaaagcccaagttaaagcaacaaatgaatccgaagacgaaatcccacagctggtaccaataggaaagaagactccagctaatgaaaaagtagagattcaaaaacatgccacaggaaagaagtctccagcaaagagtcctaatcccagcacacctcgtgggaagaaaagaaaggctttgccagcatctgagaccccaaaagctgcagagtctgagaccccagggaaaagcccagagaagaagccaaaaatcaaagaagaggcagtgaaggaaaaaagtccttcgctggggaaaaaagatgcgagacagactccaaaaaagccagaggccaagtttttcaccactcctagtaaatctgtgagaaaagcttcccacacccccaaaaaatggcccaaaaaacccaaagtaccccagtcgacctaaagtcagtgattcaactggaaggaaacctcaatgctgcctccagagctttttggaaatactcagatcctggccgcctttgtaaccttctctaaacgtcaggcctggacttaaaagattttttaaaacctccataagtagtccaggggcggtggctcacgc

SEQ ID NO: 467 - DNA, 550 bp, Homo sapiens
  misc_feature: Incyte ID No: 197046.4
agaatccaccttgcgacgtatccgctagcgcggcctgggatgcgcttgggctccctgttcgttcccacatgcagggcagcacaaggagaatgggcgtcatgactgatgtccaccggcgcttcctccagttgctgatgacccatggcgtgctagaggaatgggacgtgaagcgcttgcagacgcactgctacaaggtccatgaccctggaactgattattgactcagaaaccggctttgcgtcttcccacaaacctattgaacctggttgatcaacttaaaggcaagacagcatgaggacgaaggaagcggcgcaggtgctgcagaagtttgttcaaaacaagtggctgatttgagacaggcacggggagttcaccctgcacggccgggccatcctggagatggaacaatacatccgggagacgtaccccgacgcggtgaagatctgcaatatctgtcacagcctcctcatccaggtacccacagggcagggcacgggagctcatcactgggccctcggctcccggggctctgtacaggtacttcccggaa

SEQ ID NO: 468 - DNA, 2032 bp, Homo sapiens
  misc_feature: Incyte ID No: 1311223.1
cgcgcacgaacgcacggccgcgcagcatctgtcttgctggaagctttttcctagaggttgagcggtttgcacaatgtcggaaatggctgagttgtccgagctgtatgaagagagcagtgacctgcagatggatgtgatgcctggcgagggtgaccttccgcagatggaggtaggcagcgggagccgggagctatccctgcgtccctcccgcagcggggcccaacagctcgaggaggaaggcccaatggaggaggaggaggcccagccaatggcggcgccagaggggaaacggagccttgctaacgggcccaacgctggggagcagccaggccaggtggcgggcgcagacttcgagagcgaggacgagggcgaggaatttgatgactgggaggacgactacgactatcccgaagaggagcagctcagtggtgccggctacagagtatcagccgctcttgaagaagccgacaagatgtttctgagaacaagagaaccagccctggatggcgggtttcagatgcattatgagaagaccccgtttgatcagttagcttttatcgaagagcttttttcactgatggttgtcaatcgtctgaccgaagaactcggctgtgatgagattattgatagagagtagttagatgctgttaaaagaggaggaaactacttgaggagggacccaactttccgctatctttggggttcattccaaatagttttgtgccattgaaaaacttgaccttcaaaaaaatttgtttttcagaatagaacacaataggacagtgactgcacagttgtgaaaaaggaagagaatcattaaagaaaaagaaaaaagattttaagaccgttgaaatcaattatcaagaacgtcctaaaacacctatggctttgactttgttattgatccagattattttccttgcattggggaaaatatctttcatatttgtttgctgtaaagatggttttgcaagaataagtcatgaccaagacaaactgccaatacaaaagcccactgatactaattatataatgagaaaaaaatgtatccaactaggacacatatcttttgagttatttggactgaaagcttaagaaaacttggaaaattctattttgtgatctagtcaagccacagttatcaaaggctacattttcagtgtaagataaatggatgagtaaactcaaatatgtatcacgtgtgctttgtatcttaagatgtgtttccaagagcatctgaaattttgtttgtacatgtatcttgatcatttataaagccactgtgatctataaatcaagaaaatccattgtcataaccatttttaaaagtcaaaaattaagacatccttaattaaaaagtttcaaatctagacactaaatgtgtgtgaatgtacaaagaaaacaaaccattgcttatgctgttatatactagagaaattttgttttgcttgctgttttaacttgacagatgaaggactttagttgaacttcatattgtaagaactgttaataaaagttgtcaagtaaaaagcgctatatctaaaaagactttatgaacagttattctatcaacttttaaaggttttaaacctgcccagaaattaccttggtatctgaagtttccctctgtctcctcctctaattaagcttgttatttgtcatgcaccagcattggagataataaaatttcttgttctgtgtattttgtttggctaatagtattgcatacatactttctctgtatactactttctattgtatgtgttaaccagtattaagggaaaatgatccagcttcagctatctaattcacaaattaatttctggaaattaaactttgtaaattaagtttttgcctataagaatttgctggtctgggaaaacctgccctatcaatgagtatgttgccgtggttaccttactaagatgctgaagttctaggagagtaatgattacatcagaaggctaggttcagcaaaataagtgtatcagcaggttttatcatgatcagtaaaaatgttccaaatgcttct

SEQ ID NO: 469 - DNA, 2707 bp, Homo sapiens
  misc_feature: Incyte ID No: 205241.6
tgggacgatgccttcgccaccttctgcgggggcctggcggccaacggcgccctgcagcggctggacctccgcaacaaccagatcagtcacaagggcgcggaggagctggccctagccctgaagggcaacaccaccctccagcagctggacctgcgctggaataacgttggcctcctggggggccgggccctcatgaactgtctccccagcaacagaaccctgtggagactggacctggctgggaacaacatccctggagacgtcctcagagccgtggagcaagccatgggccacagccaggaccggctcaccaccttccaggagaaccaagcccgcactcacgtcctcagcaaggaggtccagcacctccgggaggagaagtccaagcagttcctcgacttgatggagactattgataagcagcgagaagagatggccaagagcagcagggcgtcggcagcccgtgtagggcagcttcaggaagccctgaatgagaggcactccatcatcaacgctctcaaggccaagctgcagatgacagaggccgccctggctctgtcggagcagaaggcccaggacctgggggagctcctggccacagcggagcaggagcagctgagcctgtcacagaggcaggccaaggagctcaagctggagcagcaggaagctgcagagcgggagtctaaactcctcagagacttgtctgctgccaatgaaaagaacctgcttctgcaaaaccaggtagacgagttggagcggaagttcaggtgtcagcaggagcagctgttccagaccaggcaggagatgaccagcatgtcagctgagctgaagatgcgggccatccaggccgaggagcgcctggacatggagaagagaagatgcagacagagcctggaggactccgaaagcctgcgcatcaaggaggtggagcatatgacccgtcacctggaggagagtgagaaggccatgcaggagcgggtgcagaggctggaggcggcgcggctgtccctggaggaggagctgagccgagtgaaagcagcggcactcagcgagcgtggccaggctgaggaggagctgatcaaggccaagagccaggcccgcctggaggacaagctgagccgagtgaaagcagcggcactcagcgagcgtggccaggctgaggaggagctgatcaaggccaagagccaggcccgcctggaggaggtgagccacacatgtccgccaccctccgggggagccaggctgcccggcattgcggcccgcatgcagactccagagcttcggtctgagtggggaggcgggagtgtggtgttgaggtcagatgagcacaccctggacactggtgggtccgcttcagccttggatcagggcctgagacggtggagaggtttggcccatctctgcagcctgtgactacacgcatggatggatgggaggggtggtgtgaccgaagagggaggaggagagcccagagggcatctggaggaggtggctgccaggggagcgggttcagagtcatagtaactagagcagccagtcctgcagagaggtggggtcgtgcccgtgcagacattccctcagctgagctcaggctgagcccctcatgcttcgtggcggcccctgtgctcacagcaacagcgcctggctcacctggaggacaagctgagactgctggcgcaggcacgggacgaggcgcagggcgcttgcctacagcagaagcaggtggtggccgaggcccagacccgggtcagccagctgggcctgcaagttgagggcctgcggcggcgcctggaagagctgcagcaggagctgagcctcaaggaccaggaaagggtggccgaggtgagcagggtgcgcgtggagctgcaggagcagaacggccggctgcaggcggagctggcggctcaggaggcgctgagggagaaggcggcggccctggagcgccagctgaaagtgatggcgagcgaccaccgagaggcgctgctggacagggagagcgagaacgcgtctctccgggagaagctgcggctccgggaggcggagatcgcccgcatccgggacgaggaggcccagagggcgagcttcctgcagaacgccgtcctggcttacgtgcaggcgtcccccgtgaggaccctgagccccccaaagtgagacaggccgggaggacccgggcgcagtaggagtgcatcaggcggcgcccgagatggaccaggggctgcgtcccgcccgcgccgcctctttgagacccgggtcgtctgttccacgcggcggttgcggcgactgttggtggtgtcgcggctgcgggggaaccccgtgggaggcgcctgggaagggctccctaccggccccttcttcccggtcgacgccacgtgggagcacaccgggaaggggtcccgcgggcgcgtctccccctcgccttttgcgatgtcaccgtgaacgctgcggccgcctgcgcgcggcggggtttggaaatacagcgcgtttgcactttgtgatacattctggccccgcctctccctccaaacgcgcgaccgtccgtgcctctccaaacgcgcggccctctgcccccagccctgcagggagggcctgccggggtgcggctgttcgcccctcctcgccgctgccttgaagggacgggagggccgcgggggctgtccgtctgggggttcgggcggctgcagaccccggagttcccagctggctcccg

SEQ ID NO: 470 - DNA, 5373 bp, Homo sapiens
  misc_feature: Incyte ID No: 335705.2
  unsure 4392-4487: a, t, c, g, or other
gcccggcggcgggctgggtgtttgcaatacaaaggcggccacgcgcggcgccgctcggtgcagaccatgaattacgtggggcagttagcccggccaggtgtttgtcaccgtgaaggagctctacaaggggctgaatcccgccacactctcagggtgcattgacatcattgtcatccgccagcccaatggaaacctccaatgctcccctttccacgtccgctttgggaagatgggggtcctgcgctcccgagagaaagtggttgacatagaaatcaatggggaatctgtggatttgcatatgaaattgggagataatggagaagcattttttgttcaagaaacagataatgatcaggaagttatccctatgcacctggccacctcccccatcctgtcagaaggagcttcgagaatggaatgccagctgaaaaggggctctgtggacaggatgagaggcctggaccccagcacgccagcccaagtgatcgctcccagcgagacgccgtcaagcagctctgtagtaaagaagagaagaaaaaggaggagaaagtcacagctggacagcctgaagagagatgacaacatgaacacatctgaggatgaggacatgttccccatcgagatgagctcggatgaggccatggagctgctggagagcagcagaactcttcctaatgatatacctccattccaagatgatattcctgaggaaaacctctccctggctgtgatttaccctcagtcagcctcataccctaattcggatagagagtggtcacccactcccagtccttccggttcccgaccttcaacacctaaaagtgattcagaattggtcagcaagtccacggaaaggacagggcagaagaacccagaaatgctttggctgtggggagagctgccgcaggctgctaagtcttcttctccacacaagatgaaagagtccagcccattgagcagtagaaaaatttgtgataaaagtcactttcaggccattcacagcgaatcttcagacacttttagtgaccaatcgccaactctggtcggtggggcacttttggaccagaacaagcctcagacagaaatgcagtttgtgaatgaagaagacctggagaccttaggagcagcagcgccactcttgcccatgatcgaggagctcaaacccccctctgccagtgtagtccagacagcaaacaagacggattctccttccaggaaaagagataaacgaagccgacatcttggtgctgacggcgtctacttggatgacctcacagacatggatcctgaagtggcggccctgtattttcccaaaaacggagatccttccggactcgcaaaacatgcaagcgacaacggagcccggtcagccaaccagtccccgcagtcggtgggcagctcgggcgtggacagtggcgtggagagcacctcggacgggctgagggacctcccttccatcgccatctccctctgcgggggcctcagcgaccaccgggagatcacgaaagatgcattcctggagcaagctgtgtcatatcaacagtttgtggacaaccccgctattatcgatgaccccaatctcgtggtaaagattgggagtaaatattataactggacaacagcagcacccctcctcctggcaatgcaggccttccagaaacctttgccaaaggccactgtggaatctatcatgagggataaaatgcccaaaaagggaggaagatggtggttttcatggaggggaagaaacaccacaatcaaggaggaaagtaagccagagcagtgcttggctggcaaggcccatagcaccggagagcaaccgccgcagctcagcttggccaccagggtaaagcatgaatcatcctccagtgatgaggagcgcgcagctgccaagccatcaaacgcaggccacctccctcttctgcctaatgtcagctacaagaagactctccggctgacttccgagcagcttaaaagcttgaagttgaagaatggccccaacgacgtggttttcagtgtcaccacgcagtaccaaggcacgtgccgctgtgagggcaccatctatctgtggaactgggatgataaagtcatcatttctgatattgatgggacaattaccagatcagatactcttggccacattttgcccacccttgggaaggattggacccatcagggcatcgctaagctgtaccataaagtgagccagaatggatataaatttctctactgttctgcccgtgccatcgggatggcggacatgacgcggggctacctgcactgggtcaacgagaggggcacggtgctgccccaggggcccctgctgctgagtcccagcagcctcttctctgccctgcacagagaagtgattgaaaagaagccagaaaagtttaaagtccagtgtttgacagacatcaaaaacctgtttttccccaacacagaacccttttatgctgcttttggaaaccgaccagctgatgtgtattcatacaagcaagtaggagtgtctttgaatagaatatttaccgtcaaccctaaaggagagctggtacaggaacatgcaaagaccaacatctcttcgtatgtgagactctgtgaagtagtcgaccacgttttcccgttgctgaaaagaagccattcttcagactttccctgttcggataccttcagtaacttcaccttttggagagagccactgccaccttttgaaaaccaggacattcattctgcctcagcgtaaaatgtcccaagcagcctcttgccagcagtgcagagcctggttgtcacccattaaaggataggtctccccggagtgcacagctccacctgggagcctggcgcgtcatcattggcctgacagcagagagaattgagaagcatttctcccctgccccaccccggggctgacatttctaagcaagataggaagggagcactttctaggctaggagttgggtgcatttgtaccgtgaaaagcattcctcagttgtggcttaatgccagttacgacgctgcctttccggcctgctccagcaagtagctactggttcacgtgcagtttggggctgtgaaacctaggcagaaggcggctgtctgagggctgtccccgcctaggacagggtcaatcgaggaatgccagatgtgcacggtttttggcaaagtagggggcacatttccattatagcaatgttagtgccaccaccttctgaacacagtggggagggctgtgaaggctcatgtgacctggatctgaggtctctgatagaaatctggacgccaccgggtccaggcctggcctcagacttggccttgtggatgggccccttacagtatttgctgactagtctcatttttaggtgataagtttttctttaattcctttggttaaagatagtctatttcattggcatatctccccccagtttttgtggctcaaggctggaatatttatgccttaatatatctatggcagacatttaagaatgcgctttatctagctcatggtaactttgcaacgccttagattaaaatgacagtaaatattactaaggcagtattttgaatgagtttgacactgccggcttccttccatccagcgaggtggtgctgacagtgtggacttgagcacacttatgctaaatgataatgatactgacttctgttgggagctctccaaagaaactggttggttttaagaaaatagtttcaagaagttcaactatattcttttagatattatgtattgttttactctgattaggttactgtgataggcatttattcatattctttctataccactgtcattaatatattaaaaagatgtatgtgttagactatcgaaagggccttattctctctttctcatagactgaccttcttttggaatttctgagtcatttattttccttagctttttccactcaaattaagggcaagcgaaaaagtaataatttggcattctttaagcctacagaatgtgattctttcacttgtttattacactggctcgtggacagaacaatttgaaaagtgaaagaattattttggtaaaagattttgctttacttttcgaagcattatttttttaaagagtgttttactccaacgattgaaacattttcctatttaaatttcattgttagaatcacaggaggcaaaaaatggaacggttgaatgaaattttactctttctgtgaaagaaaatccacagagttgttgcctccgttgtagttggtgggccccgttagcattggatgcctttgccaaatggttcatgtggacacacaaaggcaaacagatctgccatcgatcgcagatttctgtagaaacacggatgtgcatgtgcagattcccttttgcaggtattaaaaataattaaaaatagtcctnnnnnnnnnnnnnnnnnnnnnnnnnnnnnnnnnnnnnnnnnnnnnnnnnnnnnnnnnnnnnnnnnnnnnnnnnnnnnnnnnnnnnnnnnnnnnnnngtcctgccttaactaactcctctgcgcttgttcactagtaacctaaagaggctatattcattctttatgcaatgagggtatttttgagtgaattttaactgctctgaactaagtataagctcatgggcctgcaaaggttcagacggtttctcctttgcacccaggaggaactttggctgcgagaatggggggatgtatccctcatgcagttggcatccaggcagccctctgcagcagcacaccctgcaggcggagttttcagaggatgcaattttggatcccgaattttgatgtaccttaaacttccacatcactgcaccctgaaacagagcatgctttccagaaagtcacactctcagatctgtgtcaagttcaatgtgagccctggcaaggctggcatattaacacctgccttctggcttctgaaagtgagatttgtatatgggctgcactcacgcatatacgagttggtttatctttgtgtacatgactataacccagtgatgctgaggtcatgtgctggaatgctgtatttggaccacacatttcaaagttgccctatggaaatgaatcctacttagtgacaagtcatcaaatgtttgtcacatgtgatgaagacaaatatgtatacctggcatagagaaaaatatatacctggtacattggagaaaaataattacactttcaaagagaattccctttgcaattttatgtttggatcaccactgtaagcacactttatttgcatttgatctgtatttgtatatgctgatgcaatgataaaaatcactgtaatacttcattgtgttgtactggatgcaaagctagaaaatattgcaataaatgagaccgatgaaagacttctctgaaaaaaaaaaaaaaaggg

SEQ ID NO: 471 - DNA, 3969 bp, Homo sapiens
  misc_feature: Incyte ID No: 474711.6
  unsure 1947: a, t, c, g, or other
gctgcgaccgtcacccctgctggccacgggccagcctgcgggatctgaagacctcaccaaggaccgtagcctgacgggcaagctggaaccggtgtctccccccagccccccgcacactgaccctgagctggagctggtgccgccacggctgtccaaggaggagctgatccagaacatggaccgcgtggaccgagagatcaccatggtagagcagcagatctctaagctgaagaagaagcagcaacagctggagctcgacggggcccccggcgggggcaagcgcgcggcgcggccggcgacagcaggcaaggcgggcggcgcggccgtggtcatcaccgaacccgagcacaccaaggagcgcgtcaaacttgaagggtcaaagtgcaaagggcagcttttgatttttggggcaaccaactgggacttgattggtcgaaaagaagtgcctaaacagcaagctgcttaccgcaatctcggtcagaatttgtgggggccccacagatatgggtgcctggcgggggtccgggtgcggacagtggtctcgggctcgtgtgctgcacacagcctcctcatcaccacggaagggaagctgtggagctggggtcgaaatgagaaggggcagctgggacatggtgacaccaagagagtagaagcccctagactcatcgagggtcttagccacgaagtgattgtgtctgcagcatgtgggcggaaccacaccttggccttgacggaaacgggctccgtgtttgcgtttggggaaaacaagatggggcagctgggccttggcaaccagacagacgctgttcccagccccgcgcagataatgtacaacggccagccaattaccaaaatggcctgtggggctgaattcagtatgataatggactgcaaaggaaacctctattcctttgggtgccctgaatatggtcagctgggacacaactcagatgggaagttcatcgcccgggcacagcggatagagtacgactgtgaactagttccccggcgagtggccatcttcattgagaagacgaaagatggacagattctgcctgtaccaaacgtggttgtacgagacgtggcctgtggcgctaaccacacgctggtcctggactcccagaagcgagtcttctcctggggctttggtggctatggccggctgggccacgcagagcagaaggatgagatggtcccccgcctggtgaagctgtttgacttccctgggcgtggggcttcccagatctatgctggttacacctgctcctttgctgtcagtgaagtgggtggtctgtttttctggggggccaccaacacctcccgtgaatctaccatgtacccaaaagcagtgcaggacctctgcggctggagaattcggagcctggcttgtgggaagagcagcatcattgtggccgccgatgagagcaccatcagctggggtccgtcaccgacctttggggaactgggctacggggaccacaagcccaagtcttccactgcagcccaggaggtaaagactctggatggcattttctcagagcaggtcgccatgggctactcacactccttggtgatagcaagagatgaaagtgagactgagaaagagaagatcaagaaactgccagaatacaacccccgaaccctctgatgctcccggagactcctccgactccacacctctcgcggcagctgtcatttccatgtgcactgggacgggaagtcaaacgaggaatttaaaaaagcaaaagttgaccgaaggtgcatttttgtttagactccctgaggttccgttttacacatgatccaacgttaactacctttttttctgtatgcttcccaaagtccttttttttcccttaatgttgaattaaaatacttgctcatagttgatttaccattcctacaaaagaggcagaaactttgagcaatctaggttttttttttttnaagtttttctttcttcctttcctgaatacactccccaaaacaccccttccagttacaattagcatcgtgatccaagcagatgccacatggaagaggaatcgccatttactcagaaaaaatgtcccttacaggaaccggcagcagctaggcagtcaccggcccgcctccatccaaaatcacgctcgcgtgcttcggaagcatccgggtcactcctccgctttttcttgcagatgggcctaggccggtgtcggttctgtttctccccttggctgcctgtacgcccacagccttctggctgcgacattatagaatcggccgtgtcccccctggtgggggattggggatctatgtttagccatttatatctactttagctgttaaagaggtccaaatgaaaatcaggtgattgtggaaccatggggacttgggggtggggcagaggtgggaacatttgtatcagttgagtcagcttggtggctccctgtggagccagggctgagccttgtcacgcgcactcgccaattaagagatggaccagccagcagtcaagtgcattctccagtccttgcaagaaggatcagccctttctgtgccagcctcgatcgccttgtgctttggtctctttttctcccccccgcctggatcctgcctcgcgcgggccgtcctgttgctgagactcggggtaccgttctgctgacccagctccctttagtcacgtttgcttggctctggtaccaaatagttgggattaccgaagagtccccttccttgcgtgtcagcacggatgctgtgactgccacctgcgtcctcgtcaagtgcccgagctcgccgccgtgtgtgctgcgctgagtgagttatgaggtgcctttcccggaaccctcctctcgcctggacccaagagaggcgacagctgtggctggggctcttggtttccagagggtctggactggtttgggtgctttaaaatagatatttagttcagtggtgcttatgggggagatgggactagaacttaagtgtgagacttgggtggatgggaaagttaaatattggtctcttcaagttttttttttctttggctttgttaccacttgtcactgtctccatgttaaaatgccaaaaatgatgtagttgttgttgcttttttccctattttccaccccagtcgctccttaccgtgactcctgcccttggagggcatgtagcagtgtctgtcctgccagtcccaaggccctgtgggaggagactggcctgcatctctctaagacttagtctgacgccacgtgcatctcttgttctgtgttcaatcagtagtccaggggagaagcttctgctacttcagagctttgctaaactaacctaatttgtccaaatcaccccaaaaccaccatctctgacgtaagcttccatgcgacagcctgatccgtttccctggacaggtctctttcctggaatgcagcccaggcacctgtgctcctggcacccttgaggtctctcctttgagccgtggtcaccgagagggttgaggacgcagcacccgaggtcccagcctttgcaggagcctccctgggcttagctggacttagatcttcggtggcctcatgtaaacgtggcagccagcctcttctagaaccctagcccagggactggagcaggaaagggaccttcaaagtgaagactgccttgtcccgcagctccttctggcttagattgaaacatgggcttcctaatgggttaaatcctttaaaacaaggagttgtgggggaagggtgtcgtgcactcctagagaaaggtacacagttgcccggttgggaatgtgcttggcgctgaccctgcgggcatctgactggtcttccagctcaggaaaaagaatttgaaagaggcttagcgtgaaggggaatcaaagaggaggttgtgatttggtcgaaggtgcctggtttagtgctgtaattgtcttattattttttttatatatatatttcttggagtaaacattttaaataaacaacattgtctactgtc

SEQ ID NO: 472 - DNA, 2620 bp, Homo sapiens
  misc_feature: Incyte ID No: 903554.2
cgaggcctggcagctgtagtgcttctgggcagtagaggcgcggggtgcggagctagggcggccgagagccatggcggcgctattggcggcggcggcagtgcgagcccggatcctgcaggtttcttccaaggtgaaatccagtcccacctggtattcagcatcttccttctcttcttcagtgccaactgtaaagctcttcattggtgggaaattcgttgaatccaaaagtgacaaatggatcgatatccacaacccagccaccaatgaggtcattggtcgggtccctcaggccaccaaggcagaaatggatgcagccattgcttcctgcaaacgtgcttttcctgcatgggcagacacttcagtattaagccgccagcaggtcttgctccgctatcaacaacttattaaagaaaacttggtatgaaatctaaatgaaagaaattgccaagttaatcacattggaacaagggaagaccctagctgatgctgaaggagatgtatttcgaggccttcaggtggttgagcatgcctgtagtgtgacatccctcatgatgggagagaccatgccatccatcaccaaagacatggacctttattcctaccgtctgcctctgggagtgtgtgcaggcattgctccattcaattttcctgccatgatccccctttggatgtttcccatggccatggtgtgtggaaataccttcctaatgaaaccatctgagcgagtccctggagcaactatgcttcttgctaagttgctccaggattctggtgcccctgatggaacattaaacatcatccatggacagcatgaagctgtaaattttatttgcgatcatccggacatcaaagcaatcagctttgtgggatccaacaaggcaggagagtatatcttcgagagaggatcaagacatggcaagagggttcaagccaatatgggagccaagaaccatggggtagtcatgccagatgccaataaggaaaataccctgaaccagctggttggggcagcatttggagctgctggtcagcgctgcatggctctttcaacagcagtccttgtgggagaagccaagaagtggctgccagagctggtggagcatgccaaaaacctgagagtcaatgcaggagatcagcctggagctgatcttggccctctgatcactccccaggccaaagagcgagtctgtaatctgattgatagtggaacaaaggagggagcttccatccttcttgatggacgaaaaattaaagtgaaaggctatgaaaatggcaactttgttggaccaaccatcatctcgaatgtcaagccaaatatgacctgttacaaagaggagatttttggtccagttcttgtggttctggagacagaaacattggatgaagccatccagattgtaaataacaacccatatggaaatggaactgccatcttcaccaccaatggagccactgctcggaaatatgcccacttggtggatgttggacaggtgggagtgaatgtccccattccagtgcctttgccaatgttctcattcaccggctctcgatcctccttcaggggagacaccaatttctatggcaaacagggcatccaattctacactcagttaaagaccattacttctcagtggaaagaagaagatgctactctttcctcacctgctgttgtcatgcctaccatgggccgttagaaacaagtttgtttaagactgactccatcctgagtaatctccctttatttttgaccagcttcatttgtcagctttgctcagatcagatcgatgggattggaatacattgtaactaaaatcttcctcaggactattaacccctgcaaagtttctatagggaactgcctagtgtaacaatgaaaccagatttctcacttgctcttcatacttctattttgaggtaactgttgtaactatgaaatgcttatctgaaagtagtgcttaaacctgatttctaaaaattatcccattttctgatgatttgaaggggagaaaagccagtgtatgtaaagaaaatgttccagccaggcgcggtggctcgcgcctgtggttccatcatttgggaggccacagtgggcagactgcttgacgcccaggagttgaagaacgtggcgaaaccccgtatctattatttaaaaaaattgaaaaagtaaaaaaagaaaagggaaaaaaaattttttaaagaagatgttccaataattgcaagaagaactcttagatggggaaacaggacagaaataactcaccgcttttggttgatcctcaaacatagcgctacctaaatgccactgggagagacctcctgcaaagttttctttagcccctcttttatcccacaatacacaagatataatccatttttatatatcccaaagttgtggcaacagcttctttcttttctgctcaatgccactttgtttcctagtaattcatgaccactattaattctatcattgtcactgctcctgcttaagatcacttctcaaggatacctcagtaagcaatggataaatcaactttttgttatatgtgccaagtactaagtttcagggttctcttcagcaatcattaattaatacttcagccattaattcagatgcaaataa

SEQ ID NO: 473 - DNA, 4060 bp, Homo sapiens
  misc_feature: Incyte ID No: 038495.8
gaagcgctggacgagaggaggaattactctagggtacaaggcctcgccccaggagtggggggttgcttccgggtcgcgctcccggaaacaggaagttgcccatcctcctcgcccggcggcagctgtccccgaggcgggaggagcccgagggggcgcgagccccgcatggattttatattggaagacatggatcttgctgccaacgagatcagcatttatgacaaactttcagagactgttgatttggtgagacagaccggccatcagtgtggcatgtcagagaaggcaattgaaaaatttatcagacagctgctggaaaagaatgaacctcagagaccccccccgcagtatcctctccttatagttgtgtataaggttctcgcaaccttgggattaatcttgctcactgcctactttgtgattcaacctttcagcccattagcacctgagccagtgctttctggagctcacacctggcgctcactcatccatcacattaggctgatgtccttgcccattgccaagaagtacatgtcagaaaataagggagttcctctgcatgggggtgatgaagacagaccctttccagactttgacccctggtggacaaacgactgtgagcagaatgagtcagagcccattcctgccaactgcactggctgtgcccagaaacacctgaaggtgatgctcctggaagacgccccaaggaaatttgagaggctccatccactggtgatcaagacgggaaagcccctgttggaggaagagattcagcattttttgtgccagtaccctgaggcgacagaaggcttctctgaagggtttttcgccaagtggtggcgctgctttcctgagcggtggttcccatttccttatccatggaggagacctctgaacagatcacaaatgttacgtgagctttttcctgttttcactcacctgccatttccaaaagatgcctctttaaacaagtgctcctttcttcacccagaacctgttgtggggagtaagatgcataagatgcctgacctatttatcattggcagcggtgaggccatgttgcagctcatccctcccttccagtgccgaagacattgtcagtctgtggccatgccaatagagccaggggatatcggctatgtcgacaccacccactggaaggtctacgttatagccagaggggtccagcctttggtcatctgcgatggaaccgctttctcagaactgtaggaaatagaactgtgcacaggaacagcttccagagccgaaaaccaggttgaaaggggaaaaataaaaacaaaaacgatgaaactgctttctgggggttggttacttagttacctgccctttgcatgcatgtgtgaaccagctgtgagctgcaaggcagtggccagagcctcgccctcctgactcttcctgcaggtggctcaggaaggattcagcctggccacttggctaggactctgccagcacccatctgagactgacctcttccgggcctttggacactatgaccttgatgctgcccttcaggcaggaaacagggctggtgcctttcttcacctgcatggccagcttccttccctggcagtggagagggcagccaacaggttctaatgtcagagccatcctttaccaggtgggcctgcttgtccctgtcttgcctgccacatcactctactttttggaaggccatggctgattaaagaagttcttgtagtttcccaagcaaagtggaatctagaaacagtgaaaaaagttcagataactttgaattgcattcaagaagtacacttctttcccattgtccgtggctcttggagtctccgtgatgccaggctagagtctgattatataataattcaaaatggtaactcccaaggtaatgctttcttccatttcatcaggttcttttatccccactgcaccccctccccttctcccttgcctatctggatggcttctcagaagctcggccctagtcctccctgccttggcggggccagagcccactactgctgaggcagcactgctctcgtcagctgtgttgcctttaccaagtgtcttcagagggttatgagttagagtagctggcctggggagagggtgcctccctgggtttgatctttagggtctgactttctgcagagaagatgttttacagatgtgtcaaagctgatgtaatgtggttgggggaggaaatccagacccaaagtgtttgtcagctgggtgtacaactgcctatgtgatcctctgtcttaaaatgatttctgtctgtgctgcgaaacaaagacaaggtgaggtgtttttcttttttgtaataatataaagctgtgtgtttctgattggatgattcactatgtgcattgttttctcctaagtgcttttagtaggtagcaatcaaatggtgtaaataaggatgttcttttcctgttccttttatttttttctctctttattattcttttattgacaccactagatagctggccactggtcatgccattgccaagatgaagaaaaagcaaactacactttggcctctggttctgaattgcagaaatcaaaggatgcagtaggtgtctatgtcagaattatggatcagaggcagacaatgacgagtgaagatggttgtgaagccctcttcattcctggaggagcctgcatctcatctctcaggccctctttctctgtgggtctcatgaacagcagtggggaccattgagcacttgaatggcctgtttgtctatgggcttgcaaaggacaagcagagttcacagagctcaggatagaaacatcagagcctcctccacgggcttcagtgaaactccgatgaactgtacctgagggaattttttcttaatcaaccccttgtgtggatgaatacaggaacaacaaaacttgtgtacgtatgaaagtcatgttgttaagcagttatgatttaagaggttttaagtcagagggatcatctggaggccggctttgtgcaagcttttacagccttctgcagtgtccttaccctggctgtacatggggaagggctatgtgtaaacaagtgctttagaggcctctgagagtttttaaaaatcagacccattaacaaaagagagggtttcttaggaacaaagcaactattttgattactgagatctctgttttgtttctgtgagttactctgtattcctttccccatttcactcttgcccttcacatcttaaatgtccataagaaacccttgcatgtgttggtattctgaggcatcccgtgggaaagtcccctaagtcccattttgtacttcaacaaaaaatgactgtagcagaagataagtggagacttttatggatatactactcattttacttaaaatctacccagttcagacttgaatgtaaacttgtattaggggaaaattctccaaagagggttttctacatacacagaagcagttcaacttctcaagttaattttgataagcagaatctactactggccagagcgacaggagtggctaggggttgccagccagtccctttctgatgatcaaggccctgcacagcaggatgccacaggatgcccctgccatctagctggaagcatcaaaagtccctctgtatgacccggtgtgggaaagagggttgtcaggatgagaaagtggggctgcagggtgacgataagaccacctaaccaactccccacctccaccaccacaataagaacaaaactgtagggctctaaagagagggggtggtttacaagtttattgagcatttactaggaagtgacatggcgatgacctctgtacatgagttaggttcactttcatgtggcctcccactacagagatgcgtatgcccagaagtcagctctctgaggagacaggctacttttgccccagtttgaagcattctgtccaaatgtcctgagctctccagcagtcaagtagtgaatggataccatacttattatggttgatgaaaaaaggcagagcttatcctcaattttttttagggaagagaaggaataaaataaaagtggttcaagctgggcatggtggctcaca

SEQ ID NO: 474 - DNA, 1714 bp, Homo sapiens
  misc_feature: Incyte ID No: 018653.18
ctggagcggctgcggcaccccaacgtgctgcagctctatggctactgctaccaggacagcgaggacatcccagacaccctgaccaccatcacggagctgggcgcccctgtagaaatgatccagctgctgcaaacttcctgggaggatcgattccgaatctgcctgagcctgggccgcctcctccaccacctggcccactccccactgggctccgtcactctgctggacttccgccctcggcagtttgtgctggtggatggggagctcaaagtgacggacctggatgacgcacgtgtggaggagacgccgtgtgcaggcagcaccgactgcatactcgagtttccggccaggaacttcaccctgccctgctcagcccagggctggtgcgagggcatgaacgagaagcggaacctctataatgcctacaggtttttcttcacatacctcctgcctcacagtgccccgccttcactgcgtcctctgctggacagcatcgtcaacgccacaggagagctcgcctggggggtggacgagaccctggcccagctggagaaggtgctgcacctgtaccggagcgggcagtatctgcagaactccacggcaagcagcagtaccgagtaccagtgtatcccagacagcaccatcccccaggaagactaccgctgctggccatcctaccaccacgggagctgcctcctttcagtgttcaacctggctgaggctgtggatgtctgtgagagccatgcccagtgtcgggcctttgtggtcaccaaccagaccacctggacaggtcggcagctggtctttttcaagactggatggagccaagtggtccctgatcccaacaagaccacatatgtgaaggcctctggctgacctatctgagggctcggctgaccagctgactatcctcagcagctgggcttgcctgtggagggagtgacttgcactggcagcactgcatgtcacctgggaacccctgcagacaaagctaacatcccagacagacagatgtgaccaggacaaacgtgcaataatgccaaatgttaaaatgtgagtttaccagcctagctatgggactgctggctcctagtccaggaatcatgggggtatgactgcctctccaaccctgtgggctgtaagcaagctcaggctagtctccccactgggggctgtgcccctccctgggacggttccgtgggcagccccatcactgtgttcaatagtgtgagaatgtagctaaagcccctgctgctgctgctgcacatgccacagcaggcggtgggggctgcgtggggacaatccatcgtggagtgttctctcagcttaggtctggacaggagacttggcgggagatgctccaggatgtgggtgattctgtacctggggaggctatctctgacctcccgacaggggacactcccaggccagcccaggggtcaggggcagaggtgcacacctcagcatgagccaagactggggtcagggagcaggtgtggtttgagccaggacctggggcgggggtggggccggggcctttctgcctcatttgctttcaatgaaagcctcaaagcagccaaaaccaggctttcccccttcctcgagtttgaatatccagaatcttttgtacttcttgttggttaaattgtttatttttgtaaaaaataaaataaaattagttaataaaatgatgtttcacagcaaactcttccct

SEQ ID NO: 475 - DNA, 712 bp, Homo sapiens
  misc_feature: Incyte ID No: 097341.1
gctgttgagtgtgctctcagtggagctttggttttagctgttctctgacaaagagcttgttctgagctgcacatctcgtcctctttgttcagcctcaggcttcaagcattgaatcctaaatattctccagctgggaatcagacaagggcagaaatgaagaacccagaagcccagcaggatgtttcagtttcccagggatttcgcatgttgttttacacgatgaaacccagtgaaacttcattccacacaacatacgagcagcctgattatgtaagaaaggcaactccatataaacatttctttgatgcagcttgaacttgtagtcagctggattctcaaaggaaagccaccaggtcgcctggatgatgctttaacgtcaatctcagctggtgttctgtctcgacttccaagtctatttttcaggagcattgaactgaccagttatatttatatctgggagaactacaggctgttcaatttgccttgggattctccatggacttggtattcagccttcttaggagttgactttggctactactggttccatcgtatggctcatgaagttaatattatgtgggccggagaccaaacacatcatagttctgaagactataacttatccacagcactgagacagtctgtcctccagatatatacttcctggattttctactctcccctggccctcttcatacccccttcagtatat

SEQ ID NO: 476 - DNA, 3344 bp, Homo sapiens
  misc_feature: Incyte ID No: 242821.5
  unsure 50, 67, 2437-2749: a, t, c, g, or other
gcgccaccgtcggacgcccggggtcggaggtcacggcggcgttggaggtngcgtggttttttttttntttttcacccggaaaccgcggttgccggagcccgaactgaggcggcggcgggagcccggttggcgtctggtcttcgcgtcggccccgcggagccagacgctgcccccggcgcggggagaagatggtgcctagcggcctcgggcccgccacgcgccgccacgagtgagcccagcgcgaccgcgggcgtccgccgagcagctggcccggctgggcccggggcgcgcagatgcccgccggggcggggtggagctgatcagaataatgttcagcatcaaccccctggagaacctgaaggtgtacatcagcagtcggcctcccctggtggtcttcatgatcagcgtaagcgccatggccatagctttcctgaccctgggctacttcttcaaaatcaaggagattaaatccccagaaatggcagaggattggaatacttttctgctacggttcaatgatttggacttgtgtgtatcagagaatgaaaccctcaagcatctcacaaacgacaccacaactccggaaagtacaatgaccagcgggcaggcccgagcttccacccagtccccccaggccctggaggactcgggcccggtgaatatctcagtctcaatcaccctaaccctggacccactgaaacccttcggagggtattcccgcaacgtcacccatctgtactcaaccatcttagggcatcagattggactttcaggcagggaagcccacgaggagataaacatcaccttcaccctgcctacagcgtggagctcagatgactgcgccctccacggtcactgtgagcaggtggtattcacagcctgcatgaccctcacggccagccctggggtgttccccgtcactgtacagccaccgcactgtgttcctgacacgtacagcaacgccacgctctggtacaagatcttcacaactgccagagatgccaacacaaaatacgcccaagattacaatcctttctggtgttataagggggccattggaaaagtctatcatgctttaaatcccaagcttacagtgattgttccagatgatgaccgttcattaataaatttgcatctcatgcacaccagttacttcctctttgtgatggtgataacaatgttttgctatgctgttatcaagggcagacctagcaaattgcgtcagagcaatcctgaattttgtcccgagaaggtggctttggctgaagcctaattccacagctccttgttttttgagagagactgagagaaccataatccttgcctgctgaacccagcctgggcctggatgctctgtgaatacattatcttgcgatgttgggttattccagccaaagacatttcaagtgcctgtaactgatttgtacatatttataaaaatctattcagaaattggtccaataatgcacgtgctttgccctgggtacagccagagcccttcaaccccaccttggacttgaggacctacctgatgggacgtttccacgtgtctctagagaaggattcctggatctagctggtcacgacgatgttttcaccaaggtcacaggagcattgcgtcgctgatggggttgaagtttggtttggttcttgtttcagcccaatatgtagagaacatttgaaacagtctgcacctttgatacggtattgcatttccaaagccaccaatccattttgtggattttatgtgtctgtggcttaataatcatagtaacaacaataatacctttttctccattttgcttgcaggaaacataccttaagttttttttgttttgtttttgtttttttgttttttgttttcctttatgaagaaaaaataaaatagtcacattttaatactactctagttaggacagacttgtgctcttatcctgactaaaaagttaaatatttaagtcacatacatggtaaagatctaagtttcattttccacatggatgaccaggaacctggtcttgttggagctggcataggaggttctactgtcttgtcgtccactcttgtccctcccttctgttatcaaagttaaagcgcctcttcactcaaaagggcttcaaaatgtaaatggctctagagttagagtgactgtttgctcttctgctttctggaatgcagatgacagtatggaaagaaagaataatgattctatctaataggaaaggatttcttctttcttttttaaagagtgggtggattttctcccttttgttttgcttttattttcatgctactaacatatcttcagaaggaaatggcaactagtagatcagtaaaattacgaaaacgatgcctgcaaaatttgaaggaatgcaattctgatttgccatttatcagggaaaactgaaagcatttttcttataactttttttctttnnnnnnnnnnnnnnnnnnnnnnnnnnnnnnnnnnnnnnnnnnnnnnnnnnnnnnnnnnnnnnnnnnnnnnnnnnnnnnnnnnnnnnnnnnnnnnnnnnnnnnnnnnnnnnnnnnnnnnnnnnnnnnnnnnnnnnnnnnnnnnnnnnnnnnnnnnnnnnnnnnnnnnnnnnnnnnnnnnnnnnnnnnnnnnnnnnnnnnnnnnnnnnnnnnnnnnnnnnnnnnnnnnnnnnnnnnnnnnnnnnnnnnnnnnnnnnnnnnnnnnnnnnnnnnnnnnnnnnnnnnnnnnnnnnnnnnnnnnnnnnnnnnnnnnnnntctagtccctgtttctttttctttctaatccttattcatttaagcaaaaccatacattatcttttccagtcctttcttgtattcttactgtttttttaaaataactttttgccttaatagctcattgtcactaataacttctgtgttctcccaggcagtgttataacagaagggcaatgaaaacattggacatgaccatgagtgcttcctttccttaactctctaggtttgtagtctgttttaaattaggattagttcctgcattctgaaatacattggcctagaacattttatcccaggcatttttgaatagaaaacagttgcgtgcttttattgaagattgttaaaataatcaccatagtaacttgatatgttagtatttttctttttccttttagtatgtttcaagtgcagtaatcgtacttgtctatccagtttctatgtatgatacgagttgcttacacgatgcatggctaacttgttaatttagttttctccttagagactttgagacccttaagagacaagattgagaaagagccatgtggcttggctctagaaacgtaattatcagctttccagcacactggcgcta

SEQ ID NO: 477 - DNA, 1825 bp, Homo sapiens
  misc_feature: Incyte ID No: 203528.1
aaaaaataattgatttttacatcagagatagcaaactaagacctggggaggggggtcagcttttattttattttattttttttaagtttgctagttgggtcaaatgtgaggaggagggagtctacctgccacctcttctcttgcccctcttctgcccacacatccagcatccaaaatccattcatttaatgaattgataaagtgccgtgcaaactggtgcacaaacaggcccccagtccacgcagcctggctcctaggaaaagtggtgaccgggcgtgggggggcatgccgcagccctgggacacagtcgggcaccttccccggacccccaggccttggctgtgcctcaagtcagagagggtcagccttcaggccccggagacgagtgactggccgatcatttcacaataaaatcactcacttttggcaacttcactttttttaaggcacagtcagttccttttctcatgtacctcacaaaagatgaagaccatgtagtactctttttggtaaagttacagtgttcatgttaaatatcacttttttctacattgtgtggtaaaaagaactacgttaatagctatatcttaaatactgtgatttgactttttgaaaaatatcctaatacaaatattttactaacttacaatcactcatttaataagaaacatttggattcttttgaaatcagtgttaattgactcatattcttaaaagcctggctcttgaccctattggaaacacaaaggaagctgaaatcaaacatctaaaatacactgcgtacacgtgtgcgtgcacaagcacacacacacacacacacacacagctcttcatttctcctgagccatgcagaatttactttcaatgtggaaatctgttccctttaccacactgtatatgcacagagcacaagagaggctatctctagtcacttccaccagcgaggccttagactccgtattagaggccaccgatttcatacaacagtgtttcgctaaagacccttcactattcttgtttagtaaatagctgtctgctcttcagggaactgttacctatgggttattaccaaagaacgctggcaattggaaatgtcctgatggaaattctttgcacgtgccggttctctggcatcctccaggtggcccaacccaaagcagaaagcagaaaccacagaccccgtgagtctccccataccttgtttccaataacttggcaaaacttcttggtgcatattggttacaccctctgggattcataatgccattaggctaaaaccctaagagagagggttgacagaaacacacgcgagaatgaggcagatcccagagcaaggactgggcccagactctccacatgtgctctactagtgagtgccttatactctcagtattttggggcttacagcttcttatttgtgctaaaaaggtgcagttccaaagtaggaactgccacacaggccccagcatcctctctccaacttcatacctctctcctggtggggggagcgggcatccaggacctccggaatcaaggatgtgcagagaagagcgaaagtaatttttctagtcacatgaactgattggttccaggcaattagaaaatggctataaaataaccttaattttaaaaaaaaatcttgggtcttcgttttcctattaggagactgaactgaccacatgtattgatttatatcctgaatatatgggaacttctgtgtttgggatgtcctactgtaagactgatgaatgtacagagttaatttcagggtacagttttgccttaatggttttaaaaaataaactattttttaaaatttacaaaa

SEQ ID NO: 478 - DNA, 2221 bp, Homo sapiens
  misc_feature: Incyte ID No: 229079.16
actgggggcacctctggtgaccaagaccgggctgcgctccaaagaggccgttgggcctggagtggggttgggggggtccgagaggagttgggtgacatcccccaccccatcccgggtccagctgtttcagcccctctcggcgcgccgatactattagccccacccgtcctccatcgagtcccgtgccgctcccaaaccgcacgataagccccacagggagtgcgccataggccggggcgcgtcacggggccggggcggggcggagtccggacgtcgggagcaggatggcggcggagcaggaccccgaggcgcgcgcggcggcgcggccgctgctcactgacctctaccaggccaccatggcgttgggctattggcgcgcgggccgggcgcgggacgccgccgagttcgagctcttcttccgccgctgcccgttcggcggcgccttcgccttggccgccggcttgcgcgactgtgtgcgcttcctgcgcgccttccgcctgcgggacgccgacgtgcagttcctggcctcggtgctgcccccagacacggatcctgcgttcttcgagcaccttcgggccctcgactgctccgaggtgacggtgcgagccctgcccgagggctccctcgccttccccggagtgccgctcctgcaggtgtccgggccgctcctggtggtgcagctgctggagacaccgctgctctgcctggtcagctacgccagcctggtggccaccaacgcagcgcggcttcgcttgatcgcagggccagagaagcggctgctagagatgggcctgaggcgggctcagggccccgatgggggcctgacagcctccacctacagctacctgggcggcttcgacagcagcagcaacgtgctagcgggccagctgcgaggtgtgccggtggccgggaccctggcccactccttcgtcacttccttttcaggcagcgaggtgccccctgacccgatgttggcgccagcagctggtgagggccctggggtggacctggcggccaaagcccaggtgtggctggagcaggtgtgtgcccacctggggctgggggtgcaggagccgcatccaggcgagcgggcagcctttgtggcctatgccttggcttttccccgggccttccagggcctcctggacacctacagcgtgtggaggagtggtctccccaacttcctagcagtcgccttggccctgggagagctgggctaccgggcagtgggcgtgaggctggacagtggtgacctgctacagcaggctcaggagatccgcaaggtcttccgagctgctgcagcccagttccaggtgccctggctggagtcagtcctcatcgtagtcagcaacaacattgacgaggaggcgctggcccgactggcccaggagggcagtgaggtgaatgtcattggcattggcaccagtgtggtcacctgcccccaacagccttccctgggtggcgtctataaggtagggacagtgtcgggggcccaggagggggcaggtctgagggatggtgctgggtgggggataaggaccagccagctcaacgccctcttcctgcagctggtggccgtggggggccagccacgaatgaagctgaccgaggaccccgagaagcagacgttgcctgggagcaaggctgctttccggctcctgggctctgacggtgtggccctcccatcccccctgctgtccaccttcaaagcaccagggcccccgcttattcttgccccgtccacacagggtctccactcatggacatgctgcagttagcagaagagccagtgccacaggctgggcaggagctgagggtgtggcctccaggggcccaggagccctgcaccgtgaggccagcccaggtggagccactactgcggctctgcctccagcagggacaggtggctgccccaccgccctcatcctgacccccagccccggtagagccctgactgggagctagccccaagcttctctttccttacctcctccgtgcagctgtgtgagccgctcccatccctggcagagtctagagccttggcccagctgtccctgagccgactcagccctgagcacaggcggctgcggagccctgcacagtaccaggtggtgctgtccgagaggctgcaggccctggtgaacagtctgtgtgcggggcagtccccctgagactcggagcggggctgactggaaacaacacgaatcactcacttttcccc

SEQ ID NO: 479 - DNA, 2090 bp, Homo sapiens
  misc_feature: Incyte ID No: 475017.1
  unsure 441: a, t, c, g, or other
ccaggccccaaggaaacctcgacaaatggtcctgtaagccaagaagccttctcggtgacaggcccagccgccccaggcgccctcccaccacccagcccgaagctcaaggacgaagacttccccagcctctctgcctccacttcctcctcctgctccactgcagcaaccccgggccctgtggggttggcgctgccgtacgccatccctgccagaggcaggagtgccttccaggaggaggacttccccgccctggtgtcctcggtgcccaagcctggcaccgcccccaccagccttgtctctgcctggaacagcagcagtagcagcaagaaggtagcacagcccccactctcggcgcaggctaccggcagcggccagcccaccaggaaggctgggaaggggagcaggggcggcaggaagggcggcccgcccttcacacaggangaggaggagaaggacggcccggccctgcaggagcttctgagcacacgccccacgggctccgtctcctccacactggggctggcctccatccaaccctctaaagttgggaagaagaagaaagtgggctcggagaagccaggcaccacattgccacagcccccgcccgctacctgtcccccaggggctttgcaggccccggaagctcctgccagcagagccgaggggccagttgccgtcgtcgttaatggacacatggagggcccggcccctgctcggagtgcccccaaggaaccccctgggctcccaaggcccctggggtccttcccctgccccacgccacaggaggacttcccagcgctcggcggcccctgcccaccccggatgccgccgcccccaggcttcagcgctgtggtgctcctgaagggcacgcctcccccacccccgccgggcctggtgcccccaatcagcaagccgccccctggcttctctggccttctgcctagcccccacccggcctgtgtccccagccccgccaccaccaccaccacaaaagcacccaggctgctgcctgccccacgggcgtacctagtccccgagaacttccgggagaggaaccttcagctcatccagtccatcagggacttcctgcagagcgacgaggcccgcttcagcgagttcaagagccactcaggggagttcagacagggcctgatctccgcagcccagtattacaagagttgccgggacctgctgggggagaatttccagaaggtctttaatgagctgctggtcctgctgcccgacacggccaagcagcaggagctcctgtctgcacacacggacttctgcaaccgcgagaagcctctgagcaccaagtccaagaagaacaagaagagcgcgtggcaggccaccacccagcaggcgggcctggactgccgtgtgtgccccacctgccagcaggtgctcgcgcatggcgatgccagcagccaccaggcgctgcatgctgcccgggacgacgacttcccctccctgcaagccatcgccaggatcatcacgtagctcccgccagcgtggccagagctgtcgcaccgtgagcgtccttcctccttcctctccgggctgccaggcagccaggtaaggcctggtgaggccacttggcctcttggttggccaggcccaccaggaagtcaccaggacagtccacccgccctgttggcacactcaagcgggagtccacccctgcctcagtggtgggccagtctcggtttgcattcttgtgcttttgggaggtgccaggggagggaagggctgggatgctgggacctgttgttgctggcaaagccagaggtcacagtggcctgatctgggccctcccaaagctgagggctgcagcccgtggggcctcagagctgaaagctgcggcgccactggtgccagagtcagatgtcacagatgtgttgtgtaaacagttggctgtttcgtgcttcaagaatgttcaggattaaaagcagacaagaaattgtgctacttgaagttgaatctttttatgagacaagctgaatctgggatctcaaattgcctctgaccttttataagacagtttatcttcaaataaatttattttgcaataccaaaaaaaaaaaaaaggg

SEQ ID NO: 480 - DNA, 2672 bp, Homo sapiens
  misc_feature: Incyte ID No: 331451.18
gcggccacggggaatggttgcaatggcggaggcagaggcaggggtggcagtggaggtccgtggactgccccctgccgtgcccgacgagctgctcactctctactttgaaaaccgccgacgctctggagggggacctgtgttgagctggcagagactgggctgtgggggcgtcctcaccttcagagagcctgcagacgccgagagggcctgtggggtctgcaggcccagtggagacctctaaggggttgctggggcaggagggcctggtggaaattgccatggactcaccagagcaagaggggctggtgggtcccatggagatcaccatggggtctctggagaaggcagggcctgtgagcccaggatgtgtgaagctggcagggcaggagggcctggtggagatggtgctattgatggagccaggggcgatgcgcttcctgcagctctaccatgaggaccttcttgcgggcctgggagacgtcgctctcttgccacttgaaggaccggatatgactggctttcggctctgtggagcccaggcttcctgccaggcggctgaggagtttctgcggagcctgctgggcagcattagctgccatgtgttgtgcctggagcacccgggcagcgccaggtttctcctgggcccagaagggcagcaccttctccaggggctggaggctcagttccagtgtgtctttgggacagagcgcctggccacagccacgttggacacaggccttgaagaggtggaccctaccgaggccctcccagtgctccctggcaacgcccacaccctgtggaccccagacagtacaggtggtgaccaggaggacgtgagcctgggtagggctccctgggagccctcagcacatcctgtggccctcacttgacctcaccccctgccctgctctgtgctcccatctgtctactgacccatcttaggcccaccctgtaccctaaaaacttgctccccatctttcatccattccaactcctcctgggtccagcccctgacccaatggcctctccctgcccccagaggaggtccgagaactgctggccaccctggagggcctagacctagacggggaggactggctgcctcgggagctggaggaggaagggcctcaggagcagccagaggaggaggcgaccccagggcatgaggaggaggagcctgtggcccccagcactgtggcacccaggtggctggaggaggaggccgctctgcagctggccctccaccggtcactggagcctcaaggtcaggtggctgagcaggaggaggctgctgccctgcggcaagccctaaccctctccctgctggagcagcccccgttggaggcagaagagcccccagatggggggactgatggcaaggcccagctggtggtgcactcggcctttgagcaggatgtggaggagctggaccgggcgctcagggctgccttggaggtccacgtccaggaggagacggtggggccctggcgccgcacactgcctgcagagctgcgtgctcgcctggagcggtgccatggtgtgagtgttgccctgcgtggtgactgcaccatcctccgtggcttcggggcccaccctgcccgtgctgcccgccacttggtggcacttctggctggcccctgggatcagagtttggcctttcccttggcagcttcaggccctaccttggcggggcagacgctgaaggggccctggaacaacctggagcgtctggcagagaacaccggggagttccaggaggtggtgcgggccttctacgacaccctggacgctgcccgcagcagcatccgcgtcgttcgtgtggagcgcgtgtcgcacccgctgctgcagcagcagtatgagctgtaccgggagcgcctgctgcagcgatgcgagcggcgcccggtggagcaggtgctgtaccacggcacgacggcaccggcagtgcctgacatctgcgcccacggcttcaaccgcagcttctgcggccgcaacgccacggtctacgggaagggcgtgtatttcgccaggcgcgcctccctgtcggtgcaggaccgctactcgccccccaacgccgatggccataaggcggtgttcgtggcacgggtgctgactggcgactacgggcagggccgccgcggtctgcgggcgccccctctgcggggtcctggccacgtgctcctgcgctacgacagcgccgtggactgcatctgccagcccagcatcttcgtcatcttccacgacacccaggcgctgcccacccacctcatcacctgcgagcacgtgccccgcgcttcccccgacgacccctctgggctcccgggccgctccccagacacttaaccgaaggggccaccctctggcctcctgcttcccaggctcccagctccgcacaggctgatgctccccgcccccaactgtggccgcctgagctgtccccggggacgcccctgcctccctctgcgggctccagaaggcggtgtgggggatggcggtcagcagcggccgagaggggctgggctaggtcccagcctgggccgaccccaccaccaggggtcagcagagcccaggaggcgacaccgcccgcccgccgctcccagacctcgcccgagtcggctctgttgtttgaataaacgtgaacgtgaacccaggcggaagggacccggaaaaacaac

SEQ ID NO: 481 - DNA, 2479 bp, Homo sapiens
  misc_feature: Incyte ID No: 246290.8
  unsure 357-405: a, t, c, g, or other
atattttctgaattatctgagagaaggttgcatgtatcacattccggtacccctccatacttcaatgtgtgttatgccagaaccaaggtattctagtgtaaaggtattctagtgtataaccaccagtaccattatcaagttgaggaaatgttacattgacacagatgtaaacctttacagactttacagtccatactctaatttggtcagctgtcctgtcaatggactgttacagtttctctttcgtctgtaatagttcctctgtttttgtgctttcagcgacaatgacacttcttttgccagaggtagaccttttattcttatagaattcaaaggttatcttttaaaaacaaacannnnnnnnnnnnnnnnnnnnnnnnnnnnnnnnnnnnnnnnnnnnnnnnntagagctgaataagctggaagtaatattatcttgagagatccctgcttagggaacagcagaaacatttcactcagttcatttctgtccacagccagtcccaaaggctccagaatctccatcgctggactcggccctggcttccccactggaccctcaagccctggcctgcaccccagcttcccctccagattcacaacctcctgcttctccccaggattctgaagccctggactttgaaaccccttcctcctccctggcgccccaaactccggactctgccttggcctccgagacccttgcttctccccagtctctgcctccagcttcaccactgctagaggacagggaagagggggacctggggaaggcctcggaactagcagagaccccaaaggaggagaaagcagagggggcagcaatgctggagctggtgggatccattctccggggctgtgtccctggggtgtatcgagtccaaactgtgccctctgcccggcgccctgtggtcaagttctgtcatcggccttcaggtctccacggtgatgtctccctcagtaaccggctggccctgcataactcccgtttcctgagtctctgctctgagctggatggtcgagtccggcccctcgtgtacaccctccgctgctgggctcagggtcgggggctgtcagggagtggcccccttctcagtaactacgccctgaccttgctggtgatctattttcttcagaccagggaccctcctgtgttgcccactgtgtcccagctcacccagaaagcaggagagggggaacaggtggaagtcgatggctgggactgcagtttccccagggatgcctcaagactggagcccagcataaatgtggagcccctcagttccctgctagcccagttcttctcctgtgtatcttgttgggatcttcgtggctccctgctgtccctgcgggagggtcaggcactgcctgtggcagggggcctgccttctaatctctgggagggtctgcgccttggccccctgaatctccaggacccttttgacctgagtcacaatgtcgcagccaatgtgaccagccgggtggctgggcgcctacagaactgctgccgagcagcagccaattactgccgaagcctccagtaccagcgccgttcctcccggggtcgggactgggggctgctccctcttctgcagcccagctcccccagctccctgctctctgctacgccgatccctttaccccttgcacccttcacccagctcactgctgccctggtgcaggtattcagggaagcactggggtgccatatagaacaggcaaccaagagaacgcggtcagaaggaggtggaactggggagtcctctcagggagggacaagcaaaagactcaaagtagatggacagaaaaactgctgtgaggaggggaaagaggagcagcagggatgtgcaggggacggtggggaagacagggtagaagagatggttatagaggttggagagatggtgcaggactgggccatgcagagccctgggcagccaggggacctgcccctgaccactggaaagcatggagcccctggagaagaggggcagcccagccacgcagccctggcagagcgggggcccaagggacatgaggcagcccaagaatggtctcagggtgaggcagggaagggggcatccctgccctcctcagcgagctggcgctgtgccttgtggcaccgagtgtggcaagggcggcggcgagcccgtagacgcttgcagcagcaaaccaaggagggagctggaggtggcgctggcacaagagcagggtggctggcgactgaggctcaggtcacccaggagctgaaaggactgagtggtggcgaagagaggccagaaactgagcccctgctgagctttgtggcgtctgtctccccggctgaccgaatgctcactgtgaccccgctccaggatccccaaggcctgttccctgatctccatcatttcttacaggttttcctccctcaagcaattcgacatctcaagtgaagacatggcccctgaagggcaataaagctgctagtttattaaataca

SEQ ID NO: 482 - DNA, 428 bp, Homo sapiens
  misc_feature: Incyte ID No: 174240.1
cttgtactgcgcttctgtttacaaacgattcactgaacagacttaacttgatgatggaaatgatgaaaaacaggcctaatgtaggtgtaaaagtgtattcaaactctagacacggctaatcagattttaattcaatcatacacacataatcctttgtaatcatttttcttttaagtgaggatatctactgtctgcttcatagggtgctttgaataaaatgaaaacgtatttatactgtttttactaaggtaacaaaagcatgataatccttttttttgcaagtgtaaacgacagtctggactcttaacttcttagtgcctcagttttcctttggggtatacttcacaaggtatcagaagtactttcagtctacaggtctctatgtccacataactaaggaatgcctaactaatggaaacttaagttcc

SEQ ID NO: 483 - DNA, 1467 bp, Homo sapiens
  misc_feature: Incyte ID No: 216452.26
gcacgcagtgccggaggccgcagcgccggaacctcagaggcgggtcgcagcggcgcagaggaggtcagctgcgggagcgtttccggggacggtgccgccatgagattgaccccgcgcgcgctgtgcagcgccgcccaggccgcctggcgggagaacttccccctgtgcggtcgcgacgtggcgcgctggttcccgggccacatggccaaggggctgaagaagatgcagagcagcctgaagctggtggactgtatcatcgaggtccacgatgcccggatcccactttcaggccgcaaccctctgtttcaggaaacccttgggcttaagcctcacttgctggtcctcaacaagatggacttggcggatcttacagagcagcagaaaattatgcaacacttagaaggagaaggcctaaaaaatgtcatttttaccaactgtgtaaaggatgaaaatgtcaagcagatcatcccgatggtcactgaactgattgggagaagccaccgctaccaccgaaaagagaacctggagtactgtatcatggtcattggggtccccaacgtgggcaagtcctccctcatcaactccctccggaggcagcacctcaggaaagggaaagccaccagggtgggtggcgagcctgggatcaccagagctgtgatgtccaaaattcaggtctctgagcggcccctgatgttcctgttggacactcctggcgtgctggctcctcggattgaaagtgtggagacaggcctgaagctggccctgtgtggaacggtgctggaccacctggtcggggaggagaccatggctgactacctgctgtacaccctcaacaaacaccagcgctttgggtacgtgcagcactacggcctgggcagtgcctgtgacaacgtagagcgcgtgctgaagagtgtggctgtgaagctggggaagacgcagaaggtgaaggtgctcacgggcacgggtaacgtgaacgttattcagcctaactatcctgcggcagcccgtgacttcctgcagactttccgccgtgggctgctgggttccgtgatgctggacctcgacgtcctgcggggccaccccccggctgagactttgccctgaacttgtccgggtagggagggccggaggcatgtggcctcccagacctcctgacctgggtggttgaggctcaagacagctcacccggtccagaagctccatgctggtcactagggtgctgtgctctctggcgccccacagcctggccagctccagggaccccagttgcagggcccaagcaggtgggagtggacaccaggcttcccagtggacgtccctgagcagctccgcatgcttggttctcccggagcttcctgctcaggcctcttgagaaatggatgctgtctcagaaggagttaaagctataacctgtaacctttaaaatctccagttaaagggcctgtttcttactggcctgtgaggtgc

SEQ ID NO: 484 - DNA, 2365 bp, Homo sapiens
  misc_feature: Incyte ID No: 985408.10
gtgcagtctcagacctcccacttgtttacttcgtggcgagagggcgaaccactgcgcctgcgcactctccgtagccggatccaccttcagcgtctgcgccacgtgactccgatccaccctcgaggttccagtggaataacccccttctgaaaaatggtttcacccgctccttctctagaacgggtcgggccgctaccactgtccggcccggaggggaactgttttctccggaagtgacaacacgctgactaggaaaaggaggaggcggggcagtggggccttcggcggcgactatggaaggagccggctacagggtggtgtttgagaagggcggagtgtacctgcacaccagcgctaagaagtatcaggaccgagactctctcatcgctggtgtcatccgtgtcgtggaaaaggacaatgacgtcctcctgcactgggctcctgtagaggaggctggagattccacccaaatcctcttctccaagaaggactccagtgggggtgactcatgtgcttctgaggaggaaccaacctttgaccccggctatgaacctgactgggctgtcatcagcactgtgcggccacagctctgccactcagagcccacgagaggtgcagagcccagctgcccccagggctcctgggccttctcagtgagtctgggggagctaaagtccatccgccgctccaagccaggcctcagctgggcctacctggttctggtgacccaggctggaggttccctgcccgcactgcacttccaccgcgggggcacccgcgccctgctccgcgtcctcagccgctacctgctgttggccagctccccgcaggactcccgcctctaccttgtcttcccccacgactcctctgctctctccaactccttccaccacctgcagctctttgaccaggacagctccaatgtggtgtcacgcttcctccaggatccctactccaccaccttcagcagcttctcccgagtgaccaacttcttccggggtgccctgcagccacagcctgagggagccgcctccgaccttcccccgccacccgacgatgagcccgagcctggattcgaggtcatttcctgtgtggagctggggcctcggccaaccgtggagcggggccctccagttacagaggaggagtgggcacgccacgtgggccctgaaggtcgcctgcagcaggtccctgagctgaagaaccggatcttctcggggggtctgagccccagcctgcggcgcgaggcctggaagttcctcctagggtacctcagctgggaaggcacagctgaggagcacaaggcccacatacgcaagaaaacggatgagtatttccgcatgaagctgcagtggaaatctgtgagccctgagcaggagcggagaaactcacttctgcatggataccgcagcctcatcgaaagggatgtgagccgcactgacaggaccaacaagttctacgagggtcccgagaacccggggctgggcctgctgaacgatatcctcctcacctactgcatgtatcacttcgacctcggctacgtccagggcatgagtgatcttctctccccgatcctctacgtcattcagaacgaggtggatgctttctggtgtttctgtggcttcatggagctcgtgcaagggaactttgaagagagccaggagaccatgaagcggcaactcgggcgactgctgctgctcctgagggtgctggaccccctgctctgcgacttcctggattcccaggactccggctctctctgcttctgtttccggtggctgctcatctggttcaagagggaattccccttcccggatgtccttcggctgtgggaggtgctgtggacagggctccctggccccaatctgcacctgctggtggcctgcgccatcctggacatggagagggacaccctcatgctgtccggcttcggctccaatgagatcctcaagcacatcaacgagctgactatgaagctgagcgtggaggacgtgctgacccgcgccgaggccctgcaccgccagctaaccgcctgccccgagctgccccacaacgtgcaggagatcctggggctggccccgcccgcagagccccacagcccctcgcccaccgcctccccgctgcctctgtcgcccacccgggccccgcccaccccgccgccctccacggacacagccccgcagcccgacagcagcctggagatcctgcccgaggaggaggacgagggcgccgactcctaaccccgccaggcagcctcgttctgcacaggcactttagcccgagccaggcacacctgcgagggggcaggtgtgctccgccgccctgctgataagctggcttcattaaactgacacttctcatgtgc

SEQ ID NO: 485 - DNA, 2992 bp, Homo sapiens
  misc_feature: Incyte ID No: 413491.14
  unsure 2480-2503, 2977: a, t, c, g, or other
tggagcactgagcaccatttggaagcttgagagaaaccaaaattaaagagagaaagagagctgtttactaggcacgactgcgaaggcaagggggcaccagctcaggactgcatctgcctgccatttcccttccactcctcctttctggagtctgacattagaaagccagcgagaaggaagattcaaacaaccaaccctgatttcctgcttctccttttcatgagtgttcctgtggtctctgcacctcctttctgtcccccggcagagggcagtagagatggccggcccaaggcctcggtggcgcgaccagctgctgttcatgagcatcatagtcctcgtgattgtggtcatctgcctgatgttatacgctcttctctgggaggctggcaacctcactgacctgcccaacctgagaatcggcttctataacttctgcctgtggaatgaggacaccagcaccctacagtgtcaccagttccctgagctggaagccctgggggtgcctcgggttggcctgggcctggccaggcttggcgtgtacgggtccctggtcctcaccctctttgccccccagcctctcctcctagcccagtgcaacagtgatgagagagcgtggcggctggcagtgggcttcctggctgtgtcctctgtgctgctggcaggcggcctgggcctcttcctctcctatgtgtggaagtgggtcaggctctccctcccggggcctgggtttctagctctgggcagcgcccaggccttactcatcctcttgcttatagccatggctgtgttccctctgagggctgagagggctgagagcaagcttgagagctgctaaaggcttacgtgattgcaagggttcagttccaaccatggtcagaggtggcacatctgctcagccatctcattttacagctaacgctgatctccagctccagcgatggaacccactacagaggaggtggggcccctgtgtcaaagaggccgaggggcagcaagggcagccagggcacctgtgacttcttagtacaagattgtctgtccttcaggacttccaaggctcccaaagactccctaaaccatgcagctcattgtcacaccaattcctgctttaattaatggatctgagcaaatcttcctctagcttcaggagggtggggagggagtgattgctgtcatggggccagacttccaggctgatttgccaaatgccaaaatgaaacctagcaaagaacttacggcaacaaacgaggacattaaaagagcgagcacctcagtgtctctggggacatggttaaggagcttccactcagcccaccatagtgagtgggccgccataagccatcactggaactccaaccccagaggtccaggagtgatctctgagtgactcaacaaagacaggacacatggggtacaaagacaaggcttgactgcttcaaagcttccctggacctgaagccagacagggcagaggcgtccgctgacaaatcactcccatgatgagaccctggaggactccaaatcctcgctgtgaacaggactggacggttgcgcacaaacaaacgctgccaccctccacttcccaacccagaacttggaaagacattagcacaacttacgcattggggaattgtgtgtattttctagcacttgtgtattggaaaacctgtatggcagtgatttattcatatattcctgtccaaagccacactgaaaacagaggcagagacatgtactctggtgtgatctcttgtcctcagtgtctcttctgggctcctgtccctcttgctttatagctagctgcccggggaccaaggtacaggtgaaagcaaggtagcagcttgcgggaggaggcctgtctggcttaccagtctatacactgtggcctcaacctcccagacagggcagagaactgtgggcagctcgtttgctttctaggctggctggagaggtgggagctcattgatagactcatgatggaaactatttttgaaacaggcttcctccttcaggagagatcatgcggactaaactgtagcaattccagtgcacctggcagtgatccttttctttgcaaagtactgtctctttggttccagtaagttggaccaccacatgacatcattttccctggaacctggtcactgactaacacagacaattgggactccagagcctcaagagccaggagagggcacagtacatacagagggagtcaaatgggatctcattttgagtcctgccttccgcacactcagaacggcagccccaaggcccggagtgtccaggggcttctggcctgaggtgaatctgccaggcccaagaaggcacaaaggtaggagcacagagagccccattcccacaggcgggcggcccagcagcaccagtggaagctcagctgtcctccagctgctctcggcagacagttcagtgcacagtttatgccctagctgaaaaagatctcccggacgtatttcagnnnnnnnnnnnnnnnnnnnnnnnnagggctcctgctacaggcagagctggaaccccccggcctctgggaagggctgaggcctggagccagtgcctgtttcccactgtcctcttcctcactgctgctcccagaacttgtgtgaggcgacacggagcagggaggggagtgctctgggttatcagcccccgccagggccggctgctcgcaggccttttcctgtttgcggctctcaatcaggattcccagagcaacatcaactatctcagcctcattcatgcagtacacagtccttgtcgcagggagtctgttttttaattcaggaaggtaaatctcgttctctcgtcacacccggaattacaggtccatttgtcctcagtgggagttgatctttgattcccggaactttaagccctgccgtctcgcctggcgcccaaactctgcggacctccactggccgcccgcctcttccggccccgcgcgctccagggtcccgcgggntcccggcctcgggac

SEQ ID NO: 486 - DNA, 1193 bp, Homo sapiens
  misc_feature: Incyte ID No: 238273.6
ggagtcgtgagccggagtcagaactgcgtctcgcgacccaggcgcgggtttccggaggacagccaacaagcgatgctgccgccgccgtttcctgattggttgtgggtggctacctcttcgttctgattggccgctagtgagcaagatgctgagcaagggtctgaagcggaaacgggaggtggaggaggagaaggaacctctggcagtcgactcctggtggctagatcctggccacacagcggtggcacaggcacccccggccgtggcctctagctccctctttgacctctcagtgctcaagctccaccacagcctgcagcagagtgagccggacctgcggcacctggtgctggtcgtgaacactctgcggcgcatccaggcgtccatggcacccgcggctgccctgccacctgtgcctagcccacctgcagcccccagtgtggctgacaacttactggcaagctcggacgctgccctttcagcctccatggccagcctcctggaggacctcagccacattgagggcctgagtcaggctccccaacccttggcagacgaggggccaccaggccgtagcatcgggggagcagcgcccagcctgggtgccttggacctgctgggcccagccactggctgtctactggacgatgggcttgagggcctgtttgaggatattgacacctctatgtatgacaatgaactttgggcaccagcctctgagggcctcaaaccaggccctgaggatgggccgggcaaggaggaagctccggagctggacgaggccgaattggactacctcatggatgtgctggtgggcacacaggcactggagcgaccgccggggccagggcgctgagccctcgtgctggaatggttgtctggtatctgaactgagcctgctggctggaccaactgtcctcgaaaagacacagctggcttccctagtacagagaacagggcttgggccactttggagagacagaatctagtcctgggcaacttcacatccgtcctcctgtctcagggctggcagggggagcctggaattaccccctagtgatggaatgacagggtctggtggggactgaattccctggccctggggtcatagcttgggctgttccttctctgatacgggaagagaccccaatcagatttttcaaattaaagccagtcctgggaaatctcaaaaa

SEQ ID NO: 487 - DNA, 2931 bp, Homo sapiens
  misc_feature: Incyte ID No: 1397900.1
  unsure 2613: a, t, c, g, or other
aggctccgaagcaaggcggagagcagcctcctgcgccgcgggccccgagggcgagggcgaaccgagggggacgaggaggcggccgccatcctggagcacctggagtacgcggagcgaggcggaggcggcggccgagagcgggacgagcgcggcggacgagcggggcccggggacccggggcgcgcggagggtgcacttcgccctcctgcccgagcgctacgagccactggaggagccggcgccgagcgagcagcccaggaagaggtaccggaggaagctgaagaagtacggcaagaatgtcgggaaggtcatcatcaaaggatgccgctacgtggtcatcggccctgcaagggctttcgactgcagcactacttccgcccccgttttgcgggtagccacccagcgtggtatcccttcgtgcgctaaatgggagctggctgtggcaggtgcccccagacgtgaacgaggacgcacccagcatgtgggaactttgtgaatcctggagcatctcagacttgaacacacagcatatttggaagagaaaacatgcctttctcttgttgaatcacattagtatgatgagtgagtcatccctgcccatctgctgagcttctcacatctctcagtcacacgtggaccccgtgggtcaatcctgcagagaattcggcggaggttaggtttgggagtggagctagcgtgctaaagccagagccttcacgtgaaggtggcaaggcacttggggccggaagccaacactcaacagatgcaagcagtgtgggtgtgcagcagaacagtgatcttgggggaggaagaggatgttactagagtcagatgatttgctgtattctcctgaaaggtccgtaggctgacaggcgctcacattccttggctgcctcggttctgagggcagctaaggagctgtttattcctcaagtcatgctccccgatctccttcctcctaccactctgtcaccagggagtttaattacagccttgaggaaaaagaaaggaagaaaagatatctttgatgctttgaaaactgtgttggcagtgtggcatgactgtttaaagtagataaaaccttgtcctttttaccccatccctgcatgactgtgaagctgggcgaggaaggaggaagaagggcaagttcagatgcaggctgggtggctgggacaggttggctaagggactactctggagggctcttctgcctggcattgcccacttcggcccagccacgtgtttgcagcgaccagagtccctgcaaaggtgtggctggctgtggtcagggtgctactagcaccatcagcgcactcccgccattggctcagctcccctctgccagtccaactaagagtgctttgtcctggtgtgggacataggggctgagagagatggggggagacattaacacccaggaatgaaaatacatgatttagagaaggaaccagtaagtaggagacagatgtgaaggaaatggaaatgaggcaagaggacattggaagagagaagtttgctgtcccaggagccgaggtctggagcatcagtgtgagggagttcaggtagggcttgggcctgtgtgcctctaggtaggggacaagggaggctgggtagccagggctggtgcttaaaacccctgaggccatgagctcattgggctgcctttgtagcatcctgtcttcttctgtgctgcctggtttgatctcatctcacctggattcaaagggtaaggtgggcatgggtcttgggtcctgacacccaccaaggatgacctgtggactgccatcggatgctgaacagggagatgaaaaggaggtcctcttagccatacccctctgccaaccccccagtaggccactggttctgactttgtttccagaatatccagaaatccaaagggggctgttgctgaacagtctgcaggaccagtgacagcacctacctgttgtcccaagtgcatacataaggaggcctcaacgctcatggcttcctctaatccaagccctaccaagacagacagaaagacagacagaaaaaaggaaggggtagaggagaaggttgaagctgtggagctagactctgcttcacttcctgaagcttcaacttcatgtcgaagcattcacgtgggactccaattccctggcattgttaatatttgtgaggaaaagtgaaacaagtgatctggttttagcccagatgatgaacagtggatatggcacattttcacacacgtgagataattacagcttgccccacaacactgggtgttggagaaagggagagatagtcataagtggaagaaaaagccaagacatagtgagtgggaaagagagtgagagcctgaggcatgctgctgacgagaccccagagcagccacaagtttctctgcgtggagagatgggagggcagagcccaggggtagggggacagagctgctggggcctttcctttgcctggggaatctgtccccaggaattatgcttccccactccacatcccccaaattggaaaaaccgtacattcaagcctgttaggccctgaaattcttaagaatctggttaagaattaactcactaaatgccaaaagtcaaaacctcctaaggggttgccccngggagtcaggttcacgggtacagaagatgaatcctcagatgtcactcaacctgagccgtcattcccctgtggcagggcctgccctgggtttccccttactcaatccctggagtgtaagcatataagattgtgtcacagattacctttttaccttttctttctttttttttctttttttcaatatcagtgcccccccccttactgagtattgagttttagaggctttcgccttgatgtgcttgaccaagagacttctttggtatccttttcttgtcctatgatgtacataaaagcctcgatttatgtacacaaaaaaaa

SEQ ID NO: 488 - DNA, 1623 bp, Homo sapiens
  misc_feature: Incyte ID No: 903849.1
ggcgggagctcaggaccggcgccttctccttgcttctgggggtcgtggccttgctcccgctgtgcgggaaaagaatccaggcccttccacgcgcgtgtgggtgcgggggccccgaagtgctcgtggttccccgctaggtctccgctggggcaggaaccggaatcatgggtgggaccaccagcacccgccgggtcaccttcgaggcggacgagaatgagaacatcaccgtggtgaagggcatccggctttcggaaaatgtgattgatcgaatgaaggaatcctctccatctggttcgaagtctcagcggtattctggtgcttatggtgcctcagtttctgatgaagaattgaaaagaagagtagctgaggagctggcattggagcaagccaagaaagaatccgaagatcagaaacgactaaagcaagccaaagagctggaccgagagagggctgctgccaatgagcagttaaccagagccatccttcgggagaggatatgtagcgaggaggaacgcgctaaggcaaagcacctggctaggcagctggaagagaaagaccgagtgctaaagaagcaggatgcattctacaaagaacagctggctagactggaggagaggagctcagagttctacagagtcaccactgaacaatatcagaaagctgctgaagaggtggaagcaaagttcaagcgatatgagtctcatccagtctgtgctgatctgcaggccaaaattcttcagtgttaccgtgagaacacccaccagaccctcaaatgctccgctctggccacccagtatatgcactgtgtcaatcatgccaaacagagcatgcttgagaagggaggataaaaactttcagaatgagcaaaacaccatcaacgttaattccagagatggaacattttttttcctagtgagaaaacaacccatttgaagagaagaccactaatgagaagaccactaaagagagacatcaagaatggattcagcagaatcatttcacgttttgaacagcagcagtttgaagggccaaagccttgatcagggatcagtcattaaaggacactcttgagtattagtaaaccctcttatgatgattaaaagagaagggcagccctctccaccttttggtactttctattcaacttgcactgaccataaaatgtttctcttctgaacaagccccatcatttggtgaacctccaccctaacaaagtaggatggggttgggggctaaattaattggagtggggcgaggagagagccagaaaacatagatccgagggcagcagtgctgggtggagagagccagaaaacagatctggaggcagcagtgctggatggaattgtctaggctgtggcatgttggttttgtctttcttttctcctttgattatgtaagagctatttcattataacttattatggtgattatacaggcaagaagacaaaaaggagagaaaatgtacctcttctactggaataatgtttatgattacaagtgagataaggtatttttatcaatatgaaggcaaccttggctgataaaacctctatagtgaatactcacatctttacttcactcactatcaataataaatatattttctgacaaagaaaaaaa

SEQ ID NO: 489 - DNA, 2055 bp, Homo sapiens
  misc_feature: Incyte ID No: 978075.1
  unsure 386: a, t, c, g, or other
cccgcattcgtggtggtccctccgggtcacccatgaaagcagtgtttgtggtggagcccctgagggcttggtggggttgagcagaatgaggaaaggtttcatggagcagggagggagacggctagggcagcaagtgaaggacagactcgccttcccatccctccaggggcactcctgccagccagcccctctcccgcttgcccatgatggggtggctgttggaattctgcaccccatctcttctgattgttggggcccaggacaaggggacaggcatttgtgggcctaacctccccagggcagataggaggaggaagccatgtcccagcaggctagggcagagggacccccagtgccaacagtgctttatcagcgggcgccagggnagggccatccccagggtgaggacaacatctccctgggccctgttatcagtcacagagtccacaggacgctccttgggttaacgtgtaaccatgagccctcccctccaccccctgaagccactcgctcccagattaggtcgctctggggctatcaggccagcatggacgctggcaaagcggggcagaccctgaagactcactgctcagcccaggtgagagccttctgagctgtgcctggggctggggggacagggccctggaaccccagcagccggcgggtctgggagctgctgtccttgagttggttgggccctgggaagctgggttctggcagcctggtccctgaatgggtccagcctgtacagctggggtcccaggtgggggtgggacaggagccatgagatctgagtcccaagaatgggggctgggctgggtttcggctcagtagctccccactccccaaagcgcccagatgtctgcaggtgcctcgagccccttcatcctctcctgctgcgtgtactatctgcctctggattcccgaggaccagctgtcctggttcgctgccctggtcaagtgcctgcctgtcctctgcctggctgggttcctgtgggtcatgtccccaagcgggggctacacccagctcctccagggagcccttgtgtgctcggctgtgggggacgcttgcctcatctggccggcagccttcgtccctggcatggccgcctttgccaccgcccacctcctctacgtctgggccttcggcttctctcccctgcagcctcaggcctgctgcttcgctcattcatcctggcccctggcccctacctcagccttgtgctccagcacctcgagccggatatggtcctgccggtggcagcctatgggctgatcctgatggccatgctgtggcgcggcctggcccagggcgggagtgccggctggggcgcgctgctcttcacgctctctggatggcgtgctggcctgggacaccttacgcccagcccctgccccatgcccgcctggtgatcatgaccaacctactatgctgcccagctcctcatcacactgtcagcccttcaggagccccggtgccaaagactgactgactagggagcttgaagggccggtgttcaggccctctcctcctgcaaggacctgggcctcccagcccagcccagcctgagaaataccctcagcagcgaagcttcctgacgcctgtctgcaggcgctgctgccgccgtcgcttctgggctgaagacgttttgaaggacgatttgcggaattccaagtccactactgggttccagctgccttcccccggttctgactccagatccctggctcctcagccaggcccacatggagccctcccagccaccagcctgcctccatgttcactgtcggccccacagcctgcccgccccctgctgctgctctgaatccgttttccctgtgggtgtggaaaccgtagatgttgctgttaccgtaggagaggcctcggggagggtcatcattgtgataaaccatcgcggttaatgacagcagaaggttctttgtcgctccccatggaccaggcctggtgcccagtgggaccctccatggccctctggtggggggattcggggggataaagtgaggattgtgcagaactaaaaaaaaaaaaaaggg

SEQ ID NO: 490 - DNA, 528 bp, Homo sapiens
  misc_feature: Incyte ID No: 1340709.1
cgtgatgaaaccagtcttatggccttacactcatgtcttatctcttctaaaatgcctgacttccttcatatttttccagctccagaccacacacctgaaacctgtattatgaatactatgaagtcacaaatgtgccataaagatacattgtacattgtacttggaatcactaaagtgtagtacactagaatttagtggaggttttatttttcccaaggtgtaacaggccatgttcagtgtggtattaactaattaattcattcagatgtattggtgggacttctataaatggattgctactagattagcaaggaccaagcccaaagctgactgactgtgaatacttagaactggagatgaactacattctacatttgtgagctgaatgacaaagcacttgaacagagatgatggcgtttaagattctcgttatgtatcttagctataaaaatgaaaaagtgttggttggtcttaaaatctgataaatttattttataagtgttacaactctaataaagtattcatttg

SEQ ID NO: 491 - DNA, 2739 bp, Homo sapiens
  misc_feature: Incyte ID No: 348080.7
caaaggtttacacagtaaacaatgtgaatgtgatcaccaaaatacgcacagaacatctgaccgaggaggaaaaaaagagatataaagacaggaacccgctggaatctttgctgggaactgtggaacaccaatttggtgcacaaggggacctcaccacggaatgtgctactgcaaacaaccccacagccatcacgcctgatgagtacttcaatgaagagtttgatctgaaagacagggacattggaaggccgaaagagctgacgattagaacacagaagtttaaagcaatgttgtggatgtgtgaagagtttcccctctctctggtggagcaggtcattcccatcattgacctaatggctcgaacgagtgctcattttgcaagactgagagatttcatcaaattggaattcccacctggatttcctgtcaaaatagcttcccacatcacaaactttgaggttgatcaatctgtgtttgaaattcccgaatcttactatgttcaagacaatggcagaaatgtgcatttgcaagatgaagattacgagataatgcagtttgccatccagcaaagtctgctggagtccagcaggagccaggaactttcaggaccagcttcgaatggagggatcagccagacaaacacctatgacgcccagtatgagagggccatccaggagagcctcctcaccagcacagaaggcctgtgccccagcgccctgagcgagacaagccgttttgataatgacttgcagctagccatggagctctctgccaaagagctggaggaatgggagctccggctccaggaggaagaggctgagctccagcaagtcttacagctgtcactcactgacaaatagacctttcagcctgtgagcctctgcacaaagcagaggctgtgggctgtcacagatgctgtgtcaaccagggccctagggctaagggcctgcaccttgcgtgcatgcagcaggcaacaactgccccttctttatgcagaggtgcagaaccagggactcctgggcccatccaggctgctccctggggtggagaagggaccagggattgcaggccccatctccaggctaaggggaggagagcatcatcactttccattagctgtattggcttgcaggtcacatttttactaccagctttagacaaaaccccaatccccgcaggtttgtagataaatttttatcaaggagtgataacaagacaagttattgcagagtcagggtgcttttatatataagagcagcagccgcctttgtaaagtgtgatctatgagaattggagacacttctttactgttcaccaaagaaatgggtaatctgtgctgatctccttatttttacctttttacagggtttctaggacattgtcattattcttcctccatctatctgattccattccttccacacccagctaaagttagaggagatacatatagaatctattttagattattgttaactatttgcatcaaattaagatacacaaatggccatggatgttgccttagccttaaacattactaatagtttcacatcacctcactgcacgcatcgaaggatctgatttgaatttgtaaaggcaattcttttgagagcaggattctccaggctaaatcaaaggcagctaatcctgtccctgaaggagcagctaggggaacctgaggcttgttcttgaagtgggcaagctggccaaaatattggaacacacagaaccaaaccaggtgtgttctacacctgcatgagtgaaggatttccacgtagacacctaggaagagcccgcatgccctagactcactccagaggaaggattgatttgcaaccagaaagggagctgaaaaccacggagctccatggctcttcattcaaaagggaaaataatgattccacgttgctttttagagttcaaatcaacatctttctggataaatctattttttaacaatctttttattatttgtaaaagatataaaaacaactcccatcagtagcaatacaaggttatacattttaaccagattttctcaggccttttttggatacctttagtagttaactctcttttgtcaaaccctcttgtaaataaccatcgcacaacatacagaaccctggggaatacagccaagggcactgctcactgtggcccgtgtattcattcccacaggctgcactgaaataacctggtaaacaacaccctcctccattttgcgtcgtatttcttctattgtgcttctttggggataggaagagaaacataactactgttccaggtaacgtctgtatcatacagttagtgttgccagtgaaacgttcccagatacaaagaattgtgcttttaattccatttcacaatctgttttgttttttttttttgtcattgtctgaccaaaattccttctgcacatgaggccagtataggcaacgtcacatttgtttgtttcaaatatgcagtgtggtattttgtttactttgcatttaccgtgagcaaagatacttcttggaatggctgcagtgaggccgtgtcattggctcacaaaagtgactcataggtaatttctgtgtttgcattccactgctctgctccctaaggtccttgactttctccccaggaattcacttaaaaagggactgagcattgtgtcaacctgttgcagtgtttttcatatatgtgttcactctaaaaatgcaaataaagactgcttccttagagggtgctcatacaaaa

SEQ ID NO: 492 - DNA, 3917 bp, Homo sapiens
  misc_feature: Incyte ID No: 1382922.15
ggaaaccctggtcgcaccgccagggtgagctggcggcgggggaggcgggcagcggagccaagctgacccggcgagcggagccggggctggagagcggcgaccactgcggatctcggaaggaagaaatgatgtaaatcactcatccaaactttaaggtcaaaggtgagaaggaaggtcaggaagaacatggcctggccaaatgtttttcaaagagggtctctgctgtcccagttcagccatcatcatgttgtagtgttcctgctcactttcttcagttattcgttgctccatgcttcacgaaaaacatttagcaatgtcaaagtcagtatctctgagcagtggaccccaagtgcttttaacacgtcagttgagctgcctctggagatctggagcagcaaccatttgttccccagtgcagagaaagcgactcttttcctcggcacactggataccattttcctcttctcctatgctgtgggcctattcatcagtggcatcgttggggatcggttgaatttgcgatgggttctgtcttttggcatgtgctcttctgcattagtggtgtttgtctttggtgcgctcacagaatggctgcgtttctacaacaaatggctgtactgctgcctgtggattgtgaacggcctgctgcagtccactggttggccctgtgtggttgctgttatgggcaactggtttgggaaagccggacgaggagttgtttttggtctctggagtgcctgtgcttcggtgggcaacattttgggagcgtgcctagcttcttctgttcttcagtatggttatgagtatgcctttctggtgacggcgtctgtgcagtttgctggtgggatcgttatcttctttggactcctggtgtcaccagaagaaattggtctctcgggtattgaggcagaagaaaactttgaagaagactcacacaggccattaattaatggtggtgaaaatgaagacgaatatgagccgaattattcaatccaagatgatagttctgttgcccaagtcaaggcgataagcttctaccaggcatgttgtcttcctggagtcataccgtactcactggcctacgcctgcttgaagttagtgaattactccttcttcttctggctccccttttatctgagtaacaacttcggctggaaggaggcggaagccgacaagctgtccatttggtacgacgttggagggatcataggtggaactttgcaaggcttcatctctgatgtactacagaagagagcgccggttcttgccctgagtctgcttctggcagttgggtccctcatcgggtatagtcgttctccaaatgataagtccatcaatgcccttctgatgactgttacaggattttttattggtggaccttctaatatgattagttctgctatttctgcggacttgggtcgccaggagctcatccaaaggagcagtgaagctttggccactgtcacaggaattgtggatggttcggggagcattggagctgcagtgggccagtatttagtgtctctgatccgggacaagctaggatggatgtgggttttctactttttcattctcatgacaagttgtacaattgtgtttatctcgccattaatagtgagggaaatattctctctcgtgctaaggagacaggctcacatattgagggagtgaccggtgcccgcgagacagaaagaacaatgtcagccacatcaggaccgctggggcttcgagtctgccctaatttgggtttgtctaggagctccagcctgatcttggattgtcaggcgtctctcaacactgccagccacctgagatgctgaccagcagtgaaggctgcactagttttctacactacaggaattactgttgatgatttttgctgttgtttcatgaatgtgccgagtgacttctgactctgccagcatctttgacctctgactctgcccgcgtctttgtttggcctattgaggtttagcgttttaaccttaactgttgttttggacttgaactttctctagccttgaaaatggagtgaacaggaggcaaagccacgcgtggtttgtgttggtggtatgttccacaaatggaagagatcattgcattttgctttggtaatgagtttacagagagtgggtcatctttgaagcatcaaatcctgatcaaatgctcaagctggaccgagctgcaagcctgccttggacaaagaatccctctgttcactgtggtgggaaagatcacactacatgcctgttgattggctcagtcactctgtgtctgatctaaacgtcattcagccctagaagcatgaattgcttcaaattattgtcaacttgttctcttccattttcattcaaattaactttgactcctggaagtattgagtcttcctttcaaggaccataaggtacatcagttatcttgaacattctgacgtgtaaaggaccataaggtacatcatttatcttgaacattccgacgtgtaactcacagccgaagcactccatcccagatttgttgtctgggaactttaggatcctctaggaagctaatctgcttagtctatttttagaggattgatctctggcacaaccagcttcctggagttacctcagcagaagactagaattagagaaaagggaaagaccttttcttctagtaagtgtcaagtacagatgctctttgacttatgatggggttatgtcccagtaaacccattggaagtcaaatgcatttaatacccctgactggacaccacagcttagcctcgtccaccctaaatgtactcagaacacttagaattgcccacagttgggcagaatcatctaacacaaactctattttataatcgagtgttgaatatatcatgtaatttattgaatattgtacattatgttgaaattgcaaccatttcacaccattgtaaagtccaaaaatcagaagctgaggactgtctgtacatgacattgaatcacatgaatggattactagggcctgaggggtgtccgttctttagaaaaatgtagagtatatatatcttcagggctgtgaattccatactagttatcaatattttaagatcattctgtatatacatattttaaattatgcaagcaaactaggaggagaatgtgcaattttgagggatacctaatttgcattcggttaggggatatttttcaacctcttgctttatactctgatatggggtgtgtttatgaacttgttaatgttatttaatcatgcagatttccagtcagtgtattgctcatttactgacaaaaagggaaaatacgaaacacagaaagggaaaataaaaaaaaatcttatttctgactggattcagacttagaagtagaagctcgcagagaggaaagtctgcgtctcttcgcaatttgttcctggcgcttctccttagcctccttcattctcttggccaaaagtttagcatattctgcagcctcttctttatttttcttggtacgctgcttcttcagagcaatacgccgccgtttgtgcttctttatttaagggctttcttacaacatactggcggacatcatcttctttagagagattgaaaagtttgcggattctgctagctcttttggggcccaggcggcgaggcactgtagtatcagtcagtccaggaatatccttctctcctttttttacaataaccaagttgagaacgctcagatttgcatccacaatgcaaccacgaactgattttctctttctttctccagttctccttggtctgtaacaggaatgccccttactcagtagcaggcggacacggccatgggtgaagaatggaagggttatgtggtccgaatcagtggtgggaacgacaaaacaaggtttccccatgaagcagggtgtcttgacccatgccgtgtccccttactcagtagcag

SEQ ID NO: 493 - DNA, 2586 bp, Homo sapiens
  misc_feature: Incyte ID No: 992317.12
  unsure 491-506: a, t, c, g, or other
gcgctaggcagcttcagccggaccgggtaggggtcctcgctcgctagcttgctgtttctcggagaagctcccgagtgtccggcctagaggccatgagaaggcagtgggggtctgccatgagggcggccgagcaggcgggctgcagtggtgagcgcctcccgggccggacagcccgaggcgggcccgtggagctgcagcggggtaatcctgagccgtagcccgggcctggtgctttgccacgggggcatcttcgtccccttcctgcgagctggcagcgaagtcctgaccggggccggcgccgtcttcctgcctggcgacagttgcagggacgacctgcgcctgcacgtgcagtgggccccaacggccgcgggtcccgggggcggcgcggagcggggccgcccagggctgtgcacgccccagtgcgcgagcctcgagcccggcccacctgccccgtcccgcgggcgtccctgcagccccggcttcctgctgannnnnnnnnnnnnnnnagctgcccggccttctgggcccacttcgcgcgcctcttcggggacgaggcagcggaacagtggcgcttctcgagcgcggcgcgggatgacgaagtgtcggaggacgaggaggcggatcaactgagagcgctgggctggtttgcgctgctgggcgtgcggctaggccaggaggaggtggaggaggagcgcgggccagccatggcggtgtcgcctctcggggccgtgcccaagggtgcgccattgctggtctgcggctcccctttcggcgccttctgccccgacatctttctcaacacgctgagctgcggggtgctcagcaacgtggccggcccactgctgcttaccgacgcacgctgcctgcccggcaccgagggcggcggcgtgttcaccgcgcggcccgcgggggcgctggtggcgctggtggtggcgccgctctgttggaaggccggcgaatgggtgggcttcacgctgctctgcgccgccgccccccttttccgcgccgcccgcgacgcgcttcaccgcctgccgcacagcaccgctgccctggccgcccttctgccgccagaggtgggcgtcccgtggggtctgcccctccgagactccgggcccctgtgggcagccgcggcagtgttggtggagtgcggcaccgtatggggctccggagtggctgtggcaccccgccttgtagtgacctgtcggcacgtgtcccctcggggaagcagccagggtcctggtgcgctccaccacccccaagagtgtggccatctggggccgtgtggtatttgccactcaggagacatgtccctatgacatagcagtggtgagcctggaggaggacctggatgatgtccccatccctgtgcccgctgagcacttccatgaaggcgaggctgtgagtgtggtgggctttggcgtctttggccagtcttgcgggccctcggtgacctcaggcatcctttcggctgtggtgcaggtgaatggcacgcccgtaatgctgcagaccacgtgtgctgtgcacagcggctccagtgggggacccctcttctccaaccactcaggaaacctccttggcataatcaccagcaacacccgggacaataatacgggggccacctacccccacctgaacttcagcattcccatcacggtgctccagccggccctgcagcagtacagccagacccaagacctaggtggcctccgtgagctggaccgcgctgctgagccagtcagggtggtgtggcggttgcagcggccctggcagaggccccgcggagcaagctctgaggctgtgttaccacctttggaaagaagagtgacctttttctgctgtaggaagtgatgttgaggtgacggtggcctcaggattcagggcccagcccctgcaggggcccaggctgcctctcatctccacccactgactgcagactgggctttgggctctggggcaaacttctcttcagccccatggatccttaacctggcagcccgttttggggtgctttcttgagcccccagttctctgtcccctagcactagactcagctgtattgtttttccttctggggagcccactccaactgcacagaagttctgggcctgacaggtagattccagctggaaggcaggcccgtgcctggttttgcgtctgttcccctgagggccatcgtcatcctggagcttcaatggggccttggctcctgtctgcctctcagtcagagtcagggctgacaaaggactcagcttccttagcatctcagcagaaaccttgctctgaagaccagagacagaagggacagaaacaggagtgcctcctgctgtgccaggcccatgggcagtgcaggcagatccctgaaggtcagcactcctgggtcttcatatgccaacaggggcgctcttgacactgtgccttcattttccagcccacagcctgggtctcagggatcttgaggggtagaacatgtctggttggggcttgggaataaacatgatctattggaaaaacctctgtatttatatatcaaattgtttctttttttcaggagttgaactgggaataggcaagtaccaggcaaagaaa

SEQ ID NO: 494 - DNA, 1097 bp, Homo sapiens
  misc_feature: Incyte ID No: 200068.22
  unsure 11: a, t, c, g, or other
gcggcggccangctccgggagacttccggcagggcgggcgcggggtcttggcgaacggtcttcggaagcggcggcggcgcgatgaccacgctacgggcctttacctgcgacgacctgttccgcttcaacaacattaacttggatccacttacagaaacttatgggattcctttctacctacaatacctcgcccactggccagagtatttcattgttgcagaggcacctggtggagaattaatgggttatattatgggtaaagcagaaggctcagtagctagggaagaatggcacgggcacgtcacagctctgtctgttgccccagaatttcgacgccttggtttggctgctaaacttatggagttactagaggagatttcagaaagaaagggtggattttttgtggatctctttgtaagagtatctaaccaagttgcagttaacatgtacaagcagttgggctacagtgtatataggacggtcatagagtactattcggccagcaacggggagcctgatgaggacgcttatgatatgaggaaagcactttccagggatactgagaagaaatccatcataccattacctcatcctgtgaggcctgaagacattgaataaccctgggcagtggttcttaggcagatactctagatgctttatggacaatattattttcattggatgattctggagctctattaggagaaaagtaatcattttaggtcttaaagacttcaagaaaatacaggttatcaatttattttaaatctcattgtttccagttagcaatatcatacctattaaagctgttcattgtaacaaaattcaatcaaaaaggcagctaggtcagaaggaaacataccactctcatggttcatagtattcactgtatgtatgctagggaaaagacttgctccagtctcctcctcagttctgtgcctgagaaccactgctgcatatatttgtttttaaattttgtattgaactgttaattgaagctttaaaagcatatatgaaatgtataaatctaagatgtataatacattattgactctatgaatgttttctgaagtttgttagtcatttgtaaaactaaa

SEQ ID NO: 495 - DNA, 674 bp, Homo sapiens
  misc_feature: Incyte ID No: 199581.5
ggcgcgcagctggaacctccggctgtcagtgcgcttacagttcctaaccccgaccctgcgcgcagcccgcactatggcagccccgccgcagctaagggctctgctcgtagtcgtcaacgcactgctgcgcaagcgccgttaccacgctgcgttggccgtgcttaagggcttccggaacggggctgtctatggagccaaaatccgggcccctcacgcgctggtcatgacctttctcttccggaatggcagatcaacatgtacctgttgtcacgcgtcctgtttgccctgagccgcctggctgtagagaagggctacatccctgaacccaggtgggacccgttcccgctgctcactgcggtggtgtgggggctggtgctgtggctctttgagtatcaccgatccaccctgcagccctcgctgcagtcctccatgacctacctctatgaggacagcaatgtatggcacgacatctcagacttcctcatctataacaagagccgtccctccaattaatgcagccctgaggtgtctggctgtggctcaagatttggccccatgcagaccctcccaaaggatactgccttctcaagatcataggcctcagactccaactggtgttatcccaggtttccgtttgctgaagtaaaaacactgattttacaatccagtgggta

SEQ ID NO: 496 - DNA, 1902 bp, Homo sapiens
  misc_feature: Incyte ID No: 334177.1
  unsure 39: a, t, c, g, or other
actgcgccgggggcagcgagggcaggaagacctggcggncgccggggtcagcagccgcctcctcccccgcggaccgaggcggcgccggcggccggacagcccgtggagagcttcccgctggacttcacggccgtggagggtaacatggacagcttcatggcgcaagtcaagagcctggcgcagtccctgtacccctgctccgcgcagcagctcaacgaggacctgcgcctgcacctcctactcaacacctcggtgacctgcaacgacggcagccccgccggctactacctgaaggagtccaggggcagccggcggtggctcctcttcctggaaggcggctggtactgcttcaaccgcgagaactgcgactccagatacgacaccatgcggcgcctcatgagctcccgggactggccgcgcactcgcacaggcacagggatcctgtcctcacagccggaggagaacccctactggtggaacgcaaacatggtcttcatcccctactgctccagtgatgtttggagcggggcttcatccaagtctgagaagaacgagtacgccttcatgggcgccctcatcatccaggaggtggtgcgggagcttctgggcagagggctgagcggggccaaggtgctgctgctggccgggagcagcgcggggggcaccggggtgctcctgaatgtggaccgtgtggctgagcagctggagaagctgggctacccagccatccaggtgcgaggcctggctgactccggctggttcctggacaacaagcagtatcgccacacagactgcgtcgacacgatcacgtgcgcgcccacggaggccatccgccgtggcatcaggtactggaacggggtggtcccggagcgctgccgacgccagttccaggagggcgaggagtggaactgcttctttggctacaaggtctacccgaccctgcgctgccctgtgttcgtggtgcagtggctgtttgacgaggcacagctgacggtggacaacgtgcacctgacggggcagccggtgcaggagggcctgcggctgtacatccagaacctcggccgcgagctgcgccacacactcaaggacgtgccggccagctttgcccccgcctgcctctcccatgagatcatcatccggagccactggacggatgtccaggtgaaggggacgtcgctgccccgagcactgcactgctgggacaggagcctccatgacagccacaaggccagcaagacccccctcaagggctgccccgtccacctggtggacagctgcccctggccccactgcaacccctcatgccccaccgtccgagaccagttcacggggcaagagatgaacgtggcccagttcctcatgcacatgggcttcgacatgcagacggtggcccagccgcagggactggagcccagtgagctgctggggatgctgagcaacggaagctaggcagactgtctggaggaggagccggcactgaggggcccagacacccgctgccccagtgccacctcaccccccaccagcaggccctcccgtctcttcgggacagggccccagccgtcccccctgtctgggtctgcccactgccctcctgccccggctttccctgcccctctcccacagcccagccagagacaagggacctgctgtcatccccatctgtggcctgggggtccttcctgacaacgagggggtagccagaagagaagcactggattcctcagtccaccagctcagacagcacccaccggccccacccatcaagcccttttatattattttataaagtgacttttttattactttaattttttaaaaaaaggaaaataagaatatatgatgaatgatattgttttgtaactttttaaaaatgattttaaagagaccaaaaagaacctc

SEQ ID NO: 497 - DNA, 1430 bp, Homo sapiens
  misc_feature: Incyte ID No: 337394.18
tcgggcggtgccccgggctgggcgaggggccgggtgcggggccgctggccgagaggctgaggcggcgtcatgtcctccgaggtgtccgcgcgccgcgacgccaagaagctggtgcgctccccgagcggcctgcgcatggtgcccgaacaccgcgccttcggaagcccgttcggcctggaggagccgcagtgggtcccggacaaggagtgtcggagatgtatgcagtgtgacgccaagtttgactttctcaccagaaagcaccactgtcgccgctgcgggaagtgcttctgcgacaggtgctgcagccagaaggtgccgctgcggcgcatgtgctttgtggaccccgtgcggcagtgcgcggagtgcgccctggtgtccctcaaggaggcggagttctacgacaagcagctcaaagtgctcctgagcggagccaccttcctcgtcacgtttggaaactcagagaaacctgaaactatgacttgtcgtctttccaataaccagagatacttgtttctggatggagacagccactatgaaatcgaaattgtacacatttccaccgtgcagatcctcacagaaggcttccctcctggaggaggcaacgcacgggccacaggcatgttcctgcagtatacagtgccggggacggagggtgtgacccagctgaagctgacagtggtggaggacgtgactgtgggcaggaggcaggcggtggcgtggctagtggccatgcacaaggctgccaagctcctctatgaatctcgggaccagtaattctacgtggggctgagcttggagtacgtgtggtcaccaggactgagtcgcttggaacagcagagcctgctccttgcgtaccacagggattaatcctgcttgtgctgggaaatgcaactcactcatgtatttggagaaacaaacaggagtgttcacttatctagtgcaatatgttcacagtttattaatgctttaaacagcttcatgttttagaatttgtgtattgtccatacttaattgggggtgggagagactgagctacactactgctaaactatttttagcataatatataccatttttatgagttcgcaggtctactagaaggttctggcccatcaatattcatttcatttaattcttccacagaaccagtttgggcagtaggaactcaggcttctggtctgcagtggagcctgttcgcctctaatagccagtttacagcacttgccttagcctgtttcacagacttgtccacttaccttgtcactaatttggggcttctgggctgtgagtgatcctttgatacttcaccaaggggaacgtgggggctttgtgttttgtacttttcactcactatttcactttattaagatgactgtacagcaatttgtatataaagcttatgattaaaaactattttgaaaatacaaaaa

SEQ ID NO: 498 - DNA, 1845 bp, Homo sapiens
  misc_feature: Incyte ID No: 1099669.1
  unsure 467, 528, 540: a, t, c, g, or other
cccagatcttctcgcagcgcatctcccctgccatcgattacacctatgacagcgacatactgaagggcaacttctcaatccgtacagccaagatgcagcagcatgtgtgtgaaaccatcatccgcatctttaaaagacatggagctgttcagttgtgtactccactactgcttccccgaaacagacaaatatatgagcacaacgaagctgccctattcatggaccacagcgggatgctggtgatgcttccttttgacctgcggatcccttttgcaagatatgtggcaagaaataatatattgaatttaaaacgatactgcatagaacgtgtgttcaggccgcgcaagttagatcgatttcatcccaaagaacttctggagtgtgcatttgatattgtcacttctaccaccaacagctttctgcccactgctgaaattatctacactatctatgaaatcatccaagantttccagcacttcaggaaagaaattacagtatttatttgaaccataccatgttattgaaancaatactcttanactgtgggatcccagaagataaactcagtcaagtctacattattctgtatgatgctgtgacagagaagctgacgaggagagaagtggaagctaaattttgtaatctgtctttgtcttctaatagtctgtgtcgactctacaagtttattgaacagaagggagatttgcaagatcttatgccaacaataaattcattaataaaacagaaaacaggtattgcacagttggtgaagtatggcttaaaagacctagaggaggttgttggactgttgaagaaactcggcatcaagttacaggtcttgatcaatttgggcttggtttacaaggtgcagcagcacaatggaatcatcttccagtttgtggctttcatcaaacgaaggcaaagggctgtacctgaaatcctcgcagctggaggcagatatgacctgctgattccccagtttagagggccacaagctctggggccagttcccactgccattggggtcagcatagctatagacaagatatctgctgctgtcctcaacatggaggaatctgttacaataagctcttgtgacctcctggttgtaagtgttggtcagatgtctatgtccagggccatcaacctaacccagaaactctggacagcaggcatcacagcagaaatcatgtacgactggtcacagtcccaagaggaattacaagagtactgcagacatcatgaaatcacctatgtggcccttgtctcggataaagaaggaagccatgtcaaggtaaagtctttcgagaaggaaaggcagacagagaagcgtgtgctggagactgaacttgtggaccatgtactgcagaaactgaggactaaagtcactgatgaaaggaatggcagagaagcttccgataatcttgcagtgcaaaatctgaaggggtcattttctaatgcttcaggtttgtttgaaatccatggagcaacagtggttcccattgtgagtgtgctagccccggagaagctgtcagccagcactaggaggcgctatgaaactcagtgggatgctgatgaacaggcatttaacacaactgtgaagcagctgctgtcacgcctgccaaagcaaagatacctcaaattagtctgtgatgaaatttataacatcaaagtagaaaaaaaggtgtctgtgctatttctgtacagctatagagatgactactacagaatcttattttaaccctaaagaactgtcgttaacctcattcaaacagacagaggcttatactggaataatggaatgttgtacattcatcataatttaaaattaaattctaagaaga

SEQ ID NO: 499 - DNA, 398 bp, Homo sapiens
  misc_feature: Incyte ID No: 326679.1
agaagaaaatctggactacggctcttgaagctctacttggtaacatgaaagggaggataaaagccagggagccagaggccatctgaagcagaacatcacctactttatctcagaggcacaggcctttgtcttctgaatgacattcttcctccctagaaaatcatgtctggaaaattcttccaaacaaggctcaaaacaatgacttcagatgaaacaggctcaaatgcataaacaccagcgaaacagaggatttcgaaaatctttgcgtgtgtgctgccaacaagttcttttctgtaattcgtgggatttcaggtttagctcacatttacccctttcctcgcaaataaaagtttctgaggctgcaagcccatgggaaggccactgtcaaaggccccagg

SEQ ID NO: 500 - DNA, 3708 bp, Homo sapiens
  misc_feature: Incyte ID No: 474680.27
catgtactgcaccctcatctgtcaatctgtctatcctgtataagttgggatgaatcattttcattagatgaacaagtggctgagactttatctgacacatggcatatacacgatcatccagccgtgtgcttgtacccgttctaaatgctttctgtttgagaagggccaaaacatagagaggaaacaacttgagggagcttttttgtttttcttggcaaattttaataactatattttgattatactgtagaatgctatgtcagcataagtaagctaaacttgaagctttcttgtgaagaataaatgcaagatagaatacatcttctattttttgtggtaccaaaaatcaccatcccctcaagagtgttcatgtatagaacattctctaatgctgaagagtaaaacattatagcaacactatgtaaatgtattgaacagtatcaaagaaatagtctctaaattgtttgtaccatatttttttttctaaacttaacataatttttagctttagtttcagtcaaaactttgtcttttctctcccgagagccttagaggttaaaatgcaatcagcctaccgtgtaaggagatgttgtccatgtactttctccagccagttgggggatcattgcagctcaggcctggtgaactcagagattccattcaatattaagaatgggattgttgaattttactcacagagaaatcactgtttcttcatgttgtaagatgttttctgtttgtgtatttgtatcatggttactcatcaaaagctctcattctgcctttgtagaattcagttcccttcctttcatcatagctaaagtgacttttttccctactattaacgtgatcctacatccttaaatctcatcgattacctcacttaggccttggaaccttggcccttggtcggtgtccttggtgtcttctaagcaaggctgtgcgttgttcagaaacgtggccagaccgcatttcctgctgctcccatgccgcatgccaggtggcctgagacagagctccccatacggctgcaaggtgctttacctgtgggctttggcagtaacccaagagaggatcagaaggtggagaaggtgccacgagtgatttaacaggcctgccacagggagtgccccccgcccagctcgttctcagcacaggttttctctttgggagtacccaggtgatttctagtgacccaattttgtgtcatctccctgttttagccccacttgcctagagacaactgtttccgatgccttttctgcttatcatactagtttctaaccacgcagatttctcaaaatcatttattcaatgtattttatttgagcattagtgtattgagtaggcaggatatagggtgccggagatacagcggatgaacaagacaggcaaaacttctgctttcctaaaacttgtgatgagagagaacaataaaaaagtgttgctgccacaaagaaaccaaagtgtgtggggaagggcgcgtgtttgcggtttacatctcttctgtcccagaatcacagggatctggtccggtcacctctggtctttcctcttagtcgcctttaggagccctggttcccgtccatcctctggggggtttgtttgaagagatctcgtgtgggtacttgtcatgaaaacaccttgggcatcatctggtgtatccagttctagtctcgagaattctggtttcccactgtgctcagcaagtggaaagttcttttcaggccagaacagctctgcaccatcacatatcgtgttgcggcttagctgtttggtctgtagttcaggttatgggacttctccaatcctggaaggctgttgagctttttagaagtactgtacgctatcttcaagatggagcttggtcacatctgttaggaatccaaaggacactatgacttatttaaatcttgtcttactaaacctctcttgggcacgtgtgccagaatttctcttgttgcttcttgagccaccgcacccggcctaatctcagtttttgaagtgctccacaagtcattaggcaccaaaacattttcacctggggaacactggcatttccctgattagctgtgaagcaatctagtggctaagtgtgaaatcctgggtgcgcaggtgttctcactcccgccgtgttctcagtgcagtggtggtcagaggcccttccaaggagacatcactctgatcagttacagatagatgttctggaagatctgcaggtgagtagatccagcagagtttcttcccaccaactctagaagaaagggccttatcagagttgaccctgagcctttggtaaggttttgtgtgcatgcgattcagttatctttggcaattcttttcttgctgcagtgagagattaattggttgctgatcaaaccgttcatgcagatggggggacctttggattgtacggctttctcctcttggctgctttcttttcaggaagttggactttggccaggtttggctttcccagagccgttcctttctctgtcctttccttgggtcctcatggtgtgcccattggatccttggccttgtgatcctctgggaactgggggccagttccacttttgcagccttctgtgctggaagagaagcccagcgccctggaaggagcctctttaagtcccccatgtcgctttctctctctgctcttttagtgtctgagattgcctttctttgaatttcccagtgtttcttttccttgtcccttccctcaccaacctggagttattttggttgactatgtcctggctttggcttctcctggcaggaagtcatcaggcatcctctccaggtgagccgaaattccaccctcccaggttggacatcatcttttaaacccaatggtctactcccctccttctttatgaaacagtgatttcccgtgagtaactctggttctgattttttgtaccggcgcttaaattctttctgtagacattggaaagccacaaagaacgtgactgcagtgagcctcccactggagcagccttaaccaacactttggccaaagcccccccacctcccctgtgtactgtgtgtgtgtttggtggatacagtattccttttcagtgtccctaaagctgtgatggggagtccccacttacctagaaagcattaccagtcacctactctgcattctcagatgtaaaccttgtgtagtgttctttttgcaatgacctatttatttaacctatttatatttatttaatttttactctgaaatgtatccagttacaattgtacttgcttaaagcacatcagatttgttttggacaacacccttgaccattttaaaactggaaaagtgatactgtatccttccatgggatggatgctttacagtagtcttattattaaagggtgattaatttggtcggggtaaaatgttaatttttaggtgatttttaagaattctgtgccattatgtcttctgtgtggatggttaattgtttaattagtacgtgttaattgtgtgatacagtcttctttgtggaacccaaaatcctctttttagctttatattttataaactgccagattgtacaacttttatgtgcatttttaaagcttgaagacatgagggtcattatctaagttaaacagcctatttttgtgcctcctgtacagttttataattctgctgatggcggcatcttatgtcgagccaaccacaataaaggtagttttagattttgg

SEQ ID NO: 501 - DNA, 760 bp, Homo sapiens
  misc_feature: Incyte ID No: 206504.1
gatagtcacttgttcttgcccctggaaaaaattcaggtgatgtctttgacatccagggatttctcaaaggcagtgagtaaaatcccaaataaagcccgaaagagtttgcttttccaatcatctgtgccattggtaataaggagtagcccctgtgaggtcaggtacacagtaaagagggtaaatagaatccttgggaacttctgtttcagtctgaggaatgcttggatttgtcaaaagaatggagctttgtaggaaacaggcacaaagacgcaaacccagggcttaacctgctagaaaatgcatggaatgtgaacacaagttaattatttcaaaatgtttttcagatgttatttaaatagtaatatatacattgatttttcataatttatcaaagcctgtggtacgcactgaattttctttgtcacatagttttgaatttcacagccttctgcattgcatacacttgaactggacatcaggggaagctgcttgagagttctcaattactttcttaaacagtgttttctgaaggcgtgtgtcatgatacaactgtgaattctaccttagggactctggttaaactattggtgaggagctcgagtggtttgtatagaccccagatttttgtttactttaatgtattccacaaaacccatcctggtttttgttagtttgttttgtttttaatctttttttttccttctctacttatttaaattgccactggaataaatgtgccttttgaagcaaagtccaaaaa

SEQ ID NO: 502 - DNA, 2388 bp, Homo sapiens
  misc_feature: Incyte ID No: 333057.2
tcatcctactttgttttattgggcgttgattgttacaggtcccagcctgtagacatcttttactccaatttcctgaatagatagctttattccttcaaggtaatatagtgcggtggcttctggctgagatgtttgctgttgttttcttcatcttgtctttgatgacttgtcagcctggggtaactgcacaggagaaggtgaaccagagagtaagacgggcagctacacccgcagcagttacctgccagctgagcaactggtcagagtggacagattgctttccgtgccaggacaaaaagtaccgacaccggagcctcttgcagccaaacaagtttgggggaaccatctgcagtggtgacatctgggatcaagccagctgctccagttctacaacttgtgtaaggcaagcacagtgtggacaggatttccagtgtaaggagacaggtcgctgcctgaaacgccaccttgtgtgtaatggagaccaggactgccttgatggctctgatgaggacgactgtgaagatgtcagggccattgacgaagactgcagccagtatgaaccaattccaggatcacagaaggcagccttggggtacaatatcctgacccaggaagatgctcagagtgtgtacgatgccagttattatgggggccagtgtgagacggtatacaatggggaatggagggagcttcgatatgactccacctgtgaacgtctctactatggagatgatgagaaatactttcggaaaccctacaactttctgaagtaccactttgaagccctggcagatactggaatctcctcagagttttatgataatgcaaatgaccttctttccaaagttaaaaaagacaagtctgactcatttggagtgaccatcggcataggcccagccggcagccctttattggtgggtgtaggtgtatcccactcacaagacacttcattcttgaacgaattaaacaagtataatgagaagaaattcattttcacaagaatcttcacaaaggtgcagactgcacattttaagatgaggaaggatgacattatgctggatgaaggaatgctgcagtcattaatggagcttccagatcagtacaattatggcatgtatgccaagttcatcaatgactatggcacccattacatcacatctggatccatgggtggcatttatgaatatatcctggtgattgacaaagcaaaaatggaatcccttggtattaccagcagagatatcacgacatgttttggaggctccttgggcattcaatatgaagacaaaataaatgttggtggaggtttatcaggagaccattgtaaaaaatttggaggtggcaaaactgaaagggccaggaaggccatggctgtggaagacattatttctcgggtgcgaggtggcagttctggctggagcggtggcttggcacagaacaggagcaccattacataccgttcctgggggaggtcattaaagtataatcctgttgttatcgattttgagatgcagcctatccacgaggtgctgcggcacacaagcctggggcctctggaggccaagcgccagaacctgcgccgcgccttggaccagtatctgatggaattcaatgcctgccgatgtgggccttgcttcaacaatggggtgcccatcctcgagggcaccagctgcaggtgccagtgccgcctgggtagcttgggtgctgcctgtgagcaaacacagacagaaggagccaaagcagatgggagctggagttgctggagctcctggtctgtatgcagagcaggcatccaggaaaggagaagagagtgtgacaatccagcacctcagaatggaggggcctcgtgtccagggcggaaagtacagacgcaggcttgctgagggcctctggacacaggctggaccagatgctgtggatgtcgacccctgcactgactattggataaagacttctttcaactaagagaagatgcaaatcagcacacttttttctttgttctgccagcttccaggcctaagactaggttttgctgtctacagccaactattctattagttacaaaactcaatcattttattcagcaactggatgttgactgttaactagaagctctgtcctacttacagcactttggatcatcaaaaaaataaagtaaaatagaaaactgagaaaactcaatccatgaccagggagaacttacaggatgttagagacaaaacaagcagacacctgaaacaatcaacgcccaataaaacaaagtaggatgaaaattctcttagttctttgataacaatttgttcactcatagaaacattattaattggtagggtaagcagacactctgaaacaatgagaaaaatactaaaaattgacttgagttatttc

SEQ ID NO: 503 - DNA, 2018 bp, Homo sapiens
  misc_feature: Incyte ID No: 236253.20
gttgatgttttccagtcattccggctgacagcgttcaagttggaatcctggaggggaggtgtttttcctgtcgtacgtgggacaggccacgctgtccgtccgcagtaccgacgcctgcagcaggagcattggtttgaaaaggccctacgagacaagaagggcttcatcatcaagcagatgaaggaggatggcgcctgtctcttccgggctgtagctgaccaggtgtatggagaccaggacatgcatgaggttgtgcgaaacattgcatggactatctgatgaagaatgccgactacttctccaactatgtcacagaggactttaccacctacattaacaggaagcggaaaaacaattgccatggcaaccacattgagatgcaggccatggcagagatgtacaaccgtcctgtggaggtgtaccagtacagcacagaacccatcaacacattccatgggatacatcaaaacgaggacgaacccattcgtgttagctaccatcggaatatccactataattcagtggtgaatcctaacaaggccaccattggtgtggggctgggcctgccatcattcaaaccagggtttgcagagcagtctctgatgaagaatgccataaaaacatcggaggagtcatggattgaacagcagatgctagaagacaagaaacgggccacagactgggaggccacaaatgaagccatcgaggagcaggtggctcgggaatcctacctgcagtggttgcgggatcaggagaaacaggctcgccaggtccgaggccccagccagccccggaaagccagcgccacatgcagttcggccacagcagcagcctccagtggcctggaggagtggactagccggtccccgcggcagcggagttcagcctcgtcacctgagcaccctgagctgcatgctgaattgggcatgaagcccccttccccaggcactgttttagctcttgccaaacctccttcgccctgtgcgccaggtacaagcagtcagttctcggcaggggccgaccgggcaacttccccccttgtgtccctctaccctgctttggagtgccgggccctcattcagcagatgtccccctctgccagctgatgtgccctgttgccccccaccccatcccgcacagaaccatccctgcattccacaggggactcgggcaagggtgccgaagatagacaagaggcacacagagacagaccaactggcagccaggcagccccagaggagagagacattcagacagaggaaagtctccctgcccctcattccttccaagatgagaaaaacttgccgccaccccccgacactgatgccagggaggtgggaggaagaagtgggaaatttcccttcccagtacccccaagaacgtctgagccttcaatgttgaattttttctttattaaaattacttttatcttataaaatcaactaatcaaaaatgatatagacgacagcactggctctgtgaaggtggcatctttctgggcaggcaggccatggggcatggaggagggtgcaaagatatgggttgctgtcttctggcctccagctgcatggaggccggcccagggtctagggtgtgcactgggcaagggcagggcggcaggtgtcaggccggcttggacaatgaaaccctgaccttgctgcattccttttgcttccaccaccactagcttctttggaatcttggggtgggggtcatctttggggattatggctgccacccgggatttgagtgtagggagtgtgggagcagccttggcagatggggcacccgtgccctgcaggtgttgacaagatccgccatctgtaatgtccttggcacaataaaaccaaatgtcagtttccctgagcgactctgttctgtgtggggcaggggttgggcgggcctctgggcagaggatgcaatggcacggaccttggcttgacctcagaggtgtgaatgctctccagcagggtctgtctgggggcctggagtttgtatttgatttgctgcttattaaa

SEQ ID NO: 504 - DNA, 1454 bp, Homo sapiens
  misc_feature: Incyte ID No: 246362.2
gttcggcgcagctaacagacggcggcagtgcgagaaagccgaagatggcggtccccgcgggcgctgatcctacgggagagccccagcatgaagaaagcagtgtcactgataaatgcaatagatacaggaagatttccacggttgctcactcggattcttcaaaaacttcacctgaaggctgagagcagtttcagtgaagaagaggaagaaaaacttcaagcggcattttctctagagaaacaagatcttcacctagttcttgaaacaatatcatttattttagaacaggcagtgtatcacaatgtgaagccagcagctttgcagcagcaattagagaacattcatcttagacaagacaaagctgaagcatttgtcaatacttggtcttctatgggtcaagaaacagttgaaaagttccggcagagaattctggctccctgtaagctagagactgttggatggcagcttaaccttcagatggctcactctgctcaagcaaaactaaaatctcctcaagctgtgttacaactcggagtgaacaatgaagattcaaagagcctggagaaagttcttgtggaattcagtcacaaggagttgtttgatttctataacaagctagagactatacaagcacagctggattcccttacatgatgttttcgaagactgtttttttcatcacgctcctgccacctcattattttgcattgaagatacattgccaggttgtgttttctgaaggattcagtgacttgctttctgtaaattatatggcttatcacttcttagacaaataacaaccaatagagatcattgttaagaatactgaggttctaatatactttctttagttctgtgagccaacagtaattattaagaacactttccctttaaaggaaacaaaagtgaataccatattgtttttactgtcatagtgttgctttcttgcctgtcctgcttagtttttacttgctggatgataccataatgtatcaaggagcgtccatggatacaagataagatgtgtaccttagtagaatacagagctttggtaattacatgaataaaattaagaaaatagccatatacaatcaaatacactatggcatttttatttgaatatgatgagtatattttgcttcggaaataatataggaaggaaatgtaaaatagtgagtagtatggtatcagttaattccagtctgagcttctctgtcaacttcagtttctctctcagtttaatgatttaataatagtccaggtttttgtgtgtttttctttatactgcaaattaataatgattcactttatagtttgggagacagaatcaggtcttgaataaaataattgtaatgagtgctaaatgggcaccattattcgaatcagataccttttatattctctttccataaatacgttgatttctgtcaataaaatttttgtgtcttaggaaa

SEQ ID NO: 505 - DNA, 1001 bp, Homo sapiens
  misc_feature: Incyte ID No: 198141.3
gccgcgcgagtcctggaaagcgttgttggcccggttgctctggagccgggtctcgggtctggtggctgccggccctgcggcatctgcgccatggggagcacggagagcagcgagggccgcagggtgtccttcggagtggacgaggaggagcgggtcccgggtgctgcagggtgtccggctgtctgaaaacgtggtgaaccgcatgaaggagcccagctctccaccccctgctcccacatcttctacctttggccttcaagatggcaacttgagagcccctcacaaagaatccacactgcccaggtcggggagcagtggtggccagcagccctcagggatgaaggagggtgtcaagaggtatgaacaggagcatgctgctatccaggataagctcttccaggtggcaaagagggaaagagaggctgccaccaagcactccaaggcatccctgcccacgggcgaaggcagcatcagccatgaggagcagaagtcagtccggctggccagggagctggagagcagagaggcagagctaagacgccgtgacaccttctacaaggagcagctggagcgtattgagaggaagaatgctgagatgtataaactgtcttcagagcaattccatgaggcagcctcaaagatggagagcacaataaagccccgcagggtggagcccgtctgctcagggttgcaggcccagattctccactgctaccgagatcgcccgcatgaggtgctgctgtgctcggacctggtcaaggcataccagcgctgcgtgagcgccgcccacaagggctgaggagcagacatcattccctgccctggcagtgacttggagccctgaagaagggaccaatcatgggaccacagccactgtgccctgccgtttcctgctgggcccctgcatatgcccctgagcctggggctgccacgtgtttaggaaacaaagtatgcgctactgtctgaaaacaaataaagcagatgcctttgttttcaaaaaa

SEQ ID NO: 506 - DNA, 1759 bp, Homo sapiens
  misc_feature: Incyte ID No: 235106.13
  unsure 1183-1314, 1485-1577: a, t, c, g, or other
gggagttgacgggctgacacaggaaactcccctgaaacctgtttctcagcttcccggcccagctggggcacccactggaaggagaggccaggcggaagaccctggctccgtcatggcctctgccctgaggccaccccgtgtccccaagcctaagggtgtcctgccttcacactactatgagagctttctagagaagaaggggccctgtgaccgggattacaagaagttctgggcaggcctgcagggtctcaccatttatttctacaatagcaatcgggacttccagcacgtggagaagctcaacttgggagcatttgagaaactcacagatgagattccctggggaagctcacgtgaccctggcacccacttcagcctgattctccgggatcaggagatcaagttcaaggtagagaccttggagtgtcgggaaatgtggaaaggcttcatcttaacggtggtggagctccgtgtcccgaccgacttgaccctgcttcctgggcacctatacatgatgtctgaagtcttggccaaagaggaggcgcgccgtgcactggagacaccctcgtgcttcctgaaggtgagccggctggaggcacaactgctcctggagcgctaccccgagtgcgggaacctgctgctgcggcccagcggggacggcgccgacggcgtgtcggtcaccacgcggcagatgcacaacgggacgcacgtggtccggcattacaaggtgaagcgggagggccccaagtacgtgatcgatgtggaacagccgttctcttgcacctccctggacgccgtggtcaactatttcgtgtcgcataccaaaaaggcgctggtgccattcctgttagacgaggactacgagaaggtgctaggctacgtggaagccgataaggagaatggcgagaatgtgtgggtggcgccctccgctccgggcccaggtcctgcaccctgcacaggtggccccaagccgctgtcacctgcgtctagccaggacaagctgcccccactgcccccactaccgaaccaggaagagaactacgtgacccctattggagatggcccagctgttgactatgagaaccaagatgtggcttcctctagttggccagtcatcctgaagccaaagaagttgccaaagcctcctgccaagcttccaaagccacccgttggacccaagccnnnnnnnnnnnnnnnnnnnnnnnnnnnnnnnnnnnnnnnnnnnnnnnnnnnnnnnnnnnnnnnnnnnnnnnnnnnnnnnnnnnnnnnnnnnnnnnnnnnnnnnnnnnnnnnnnnnnnnnnnnnnnnnnnnnnccagagcccaaagtctttaatggtggcttgggcaggaagctgccagtcagttcagcccagcctctcttccccacagccggtaaggggtctgcggggtcagtgcggggcgggcttcccaggtgtgtgaccgtacagtcacacaagtccccacactccgaagcgccctgtctnnnnnnnnnnnnnnnnnnnnnnnnnnnnnnnnnnnnnnnnnnnnnnnnnnnnnnnnnnnnnnnnnnnnnnnnnnnnnnnnnnnnnnnnnnnnnggtggctgtcagggcggtgggcatggactggggatccctgagccagctgcagctcctggtcctgaacccccagggctggcagacatgacggcagagctacagaagaagctggagaagaggcgggcactggagcactgattcggacacaccagggaccagcgggctagtcccagggcatggcc

SEQ ID NO: 507 - DNA, 461 bp, Homo sapiens
  misc_feature: Incyte ID No: 235106.10
cggcattacaaggtgaagcgggagggccccaagtacgtgatcgatgtggaacagccgttctcttgcacctccctggacgccgtggtcaactatttcgtgtcgcataccaaaaaggcgctggtgccattcctgttagacgaggactacgagaaggtgctaggctacgtggaagccgataaggagaatggcgagaatgtgtgggtggcgccctccgctccgggcccagagcccaaagtctttaatggtggcttgggcaggaagctgccagtcagttcagcccagcctctcttccccacagccgggctggcagacatgacggcagagctacagaagaagctggagaagaggcgggcactggagcactgattcggacacaccagggaccagcgggctagtcccagggcatggcccagcggccagattctttttcccaggattaaaactctgaccccaggaaaaaa

SEQ ID NO: 508 - DNA, 3629 bp, Homo sapiens
  misc_feature: Incyte ID No: 404701.2
cacaatggctcactgtcctcgatgacaacacttttaggatctcatttattcattctttaagtaatttttcttttaaaaaagggataggtggaaaaaatagttgggaaatctttaactaggctaaggtttagacataggtataaattaaaatatttattttgtaacattcaaaaaccaaaaaccaccctgacatactgggtggcaagaaaagtcaagatcagattaaacatttgttttgcactaatcacaaaactaataatccaagtcactatcatcaactccagttgatctcagctctgattatgcatcagaacaccctgtgaggtctattaagttcctataccaaatcccaaacactcttgaatcagtctacaaagttgggacctaggtatctgtacattttttaaagttcctcaaaaaattctgcttctaggcaaatgtaatagatattgtgcgttgctcatgtttttcctatcagaaccatgattttaaaaaaactatcctttctgtccccatatatccctcatgtggcctccacttctactctcagctccagtggacctgactgccctaaaggttattctagaccctttgccagtgactggctcagggatggacaggtctaagttactttagagcaatgagacctaaggatatggaaagtgaattctgggaaagctttctcatactaggacagggcccctagaatccagcctgactcttccgctgcatgtaaatgaagatgcacaaggctccaactgctactggcaatcatcccatgaccacgagggtagccagccttaggatgatgccaatgttgtggttgaaaagggggtggggtgtggacggcgggttcccaaggttcttgatgacattactgaatcattggatcagaaacactgcagcacattctgtcaatagatttcatgtattgtgaatcaatatattttcttactgtttttaagtcattttaagttggacttttagtggtcagcatctgaatgttaaagagtggtcccagcacagcattctttaattataacaatctgtatcaagtagaatccacacaaacaccccttcgtacttacataatctgtaaatctgatgtatctttcctattttaacaaaatctttaatttatatcgttataccttactaaagtgttaatgtgcattgcattcacttcattatttactcagagttcttgctgtaggctttgtcttgaatgtgtaggaccattcgtcgtgcatagaagtccctatattcctctggtaactcggccagtgttttcaaggctctgtccagaatttgtgcagctcttgatgctgctgtaggatctttgtttccataggtatctgttttatcatagcattcagatggaaggtgcttccaaaagatattcactcccactccaaactcttcagaaattacattatggaaccataaagcaggaatgaataatacatcaccagcttcaagggaacattcatatcttctagccttggaaaaaagtggatatttagccaagtctgggttatctatattcagtacttctgatttagtaccttttaaatataaatactgggcatctcgaggactgaagagtacaacacgcttttttcctgtcacttgtattaacaaattatccattacatcataatgagtccatagttgtaatcctggtgaactaattcgaaaaacactggaaaagaactgttcctctttgaagaattctggaaacttaatatctcctttcaacaaaggaaactgctttctgatatctgcaacatcctttctagggtcttctccaagtgaccgtaagtagtatttctcatcctctgaaaccaagaattctttatgtttctcttcagctgccctctggaccaactggtcaaaaggtaaagtttaatgaagtccatctgtgcaactgcagcaacatgaatctttacttctttcttccctccaacttggcttaggtaatccactgtccatttgcttgtacatggccccaaatcaatcccttccaacacaagaggttttctctgtgggtagaggtgctgcatgaactgctcccgagaaacgccctccagccggggtaccgggaggtgctgcccggccatggttgctcacgcctgccctcttccaggtcttcggaacttcggctctaaagcgttcctcagcgccatccgcccggaaacacgagcgacagagaaaaggtccgcgaggccggcagactccagagtggctgggtccgagcgcggggcgggttgccgaagggcctcggcctgggctgcgtgctggagagcggggacggggccgactcaccagaggctgcagcaacaggtccactttgctctccagtctctttctccgacaccgctgaggcggttttccaccgacttcctttccatacagcaccggcaggcaccggtgtgaagggtcataaaaatggcgctggccgctcgtttgctaccccagttcctgcactctcggtcgctgccctgcggggccgtccgactccggactcctgctgtggccgaggtgaggctgccgtcggccacactttgctacttctgccgctgtcgcctcggcttgggagcggcgttatttccacgaagcgctagggccttggcagcctcggcgctacctgcccagggctcccggtggccagtgctcagcagcccgggactccccgcagccttcgcttctttccctgcctgccctcagcgcagctacagcacggaggagaagccccagcagcaccagaaaaccaagatgatcgtcctgggattctccaaccccatcaactgggttaggactcgaattaaggccttccttatctgggcctatttcgacaaagagttcagcatcacagagttctccgagggagcgaagcaggcttttgctcatgtatccaagttgctgtcacagtgtaaatttgatctgttggaagaacttgtggccaaagaggtgctacatgcattgaaagaaaaggttacttcactacctgacaaccataaaaatgcccttgctgctaacatagatgaaattgtatttacatcaacaggagacatctccatttactatgatgagaaaggaaggaagtttgttaacatcctgatgtgcttttggtatctaaccagtgccaacatccccagtgaaactttaagaggagccagtgtattccaggttaagttggggaatcagaatgtggaaactaaacaacttcttagtgcaagctatgagtttcagagggagttcacacaaggagtaaagcctgactggaccattgcacggattgaacactcaaaattattagaataattttcttggaaaaatcagcttatggactttagcagttgctgtgaaaaactaaggaagaaaaattttggggtcatttgatcttcacttaatctaagtctgtgaattacttttatattattttgaaatactccttgcagtatattggcatgatacagtaaaagcattttccacagattgttatcaccttctttaaaagaagtcaaaatttaaaaaatacaatagcacgttgttggtgtcatattcaataacatttccaatgctacatataattttatagacataataaagaaggtattgaaaaaact

SEQ ID NO: 509 - DNA, 3343 bp, Homo sapiens
  misc_feature: Incyte ID No: 406695.4
gtttctcaggacccttgattagggaagatgtacataaggtggatattatgacgttttgccagcagaaagcagctcagagctgcaaatctgagacactggggagcagagactcagctctactgtggcagctcttggttctcctttgtcgccagaatgggtccatggtggggtctgacatcgctgagctgctaatgcaagactgcaagaagctggagaagtacaagcggcagccccctgtggccaacctcatcaacctgaccgatgaggactaggccagtgctgagctctgggaccccgaacctgctcacgggagagatcccccccagtgtggagacacctgcgcagatcgtggagaaattcactaggctgctctactatggaaggaagaaggaagccttggagtgggccatgaagaaccacttgtggggccatgctttgttcctgtccagcaagatggaccccccaagacctacagctgggtcatgagtggcttcaccagcacgctggcgctcaatgacccactgcagaccctcttccagctcatgtcggggaggattccacaggcagccacgtgttgtggagaaaagcagtggggagactggaggcctcacttggctgtgattctgtcgaatcaggctggggacccagagctgtatcagcgtgcgattgttgccatttggggacaccctggctgggaaggggcttgtggaggcagctcacttctgctatctcatggctcacgtgccctttggccactacaccgtgaagacagaccatctggtcttgctgggcagcagccacagtcaagagtttttgaaatttgcaacaactgaggcaatccagaggacggaaatcttcgagtactgtcagatgctgggccgccccaaatccttcatcccttctttccaggtgtataagctcctttatgcttcccgtctggcagattatggcctcgtgtcccaggctttgcattactgcgaagccattggtgcagctgtcttgagccagggagagagcagtcaccctgtgctattagtggaactcatcaagctagcagagaaactgaagctgtcagatcctctggttttagaaagacgcagtggagacagggacctggagccagattggctagcgcaacttcggaggcagctggagcaaaaggtagcaggagacattggggatcctcatcctactcgctcagatatttcgggagccagaggaacaacaacagaaaacactttctaccaggacttttctggatgtcaaggctactctgaagcccctgggtaccgctcagctctgtggctgacacctgagcagacctgcctgctccagcccagcccacagcagccctttcccctccagccgggctcctacccagcatggagggggtgcagggcagacatgggacaccgaggcctttttactcagttcctgatgacccatctaccagtggactggcagcagctgtggcatgtgacagaggccactggaggaacagtctgggaggaaatgctgcagacacacctgggccctggatgagaacacagtgtctcaagaaacttcccagcctcctgatggccaagaggtcatttccaaaccacagacaccattggctgctagaccacgaagtatttctgagagttccgccagttcagccaaggcggatgaccaaggagtcctctgatgaggctgataaaaactctccccgaaatactgcccagagatggcaagctcggacgatgggaaggagcatacaaaagagctcagggttttggctggttcacgctggtttccgatcgaagcccaccaagaacgcatcccccgctggagacgaggactcctcagacagccctgactctgagcaggagacccccagagcatcttctccccaccagggctggcctgggccttcttcactgacaccttcccctggagtccccaccttttgccggatgttagtgcctttttccaggggcagaggtgggggtgaaggccgaggatccgcatccagcgggggagcagctgcgggcgctggggttggaggcttgtctggaccagagagtgtttcctttgagctctgctccaaccctggtgttcttcttcctccacctgccttaaaaggggctgttcctctttacaacccatctcaggtgcctcagctgcccacggccactagcctgaatctggccaaatcgcctagctcagcgtcgctatcccacccagccatgctgagaataaacacacgtcccaggctcatctcccaggactgaaactttcttgctctctttttctcaatctcccagcccctctctaccatattgggaccctcaagaaggtttgtgctaagcccgatgcctccaccgggcacttagaaggcaagaggacaggatctctcaagacacagcacaattcagtctcttaagattagcttcacaatgatggaaattatttcatcaggtggaaagtctgggtctaatagcagactgcacatgagcagagtgacatgggtggtggcacttatggtggtggcttgagagccttggggaaattagggccctaacagctagaatcaaagatgataccgcagggccctgtagcaagaaatgggaagcagggggaggggcaggggctcagaacaatattctagaccaactttgactacttcctgtcttagtaatagaccaatacatggctctatttagcaaagtttttatactgaaacttgattattgctgccccttttataaatttcctcttcaatgatatttcagcagtttcccctcttggtccctagtttttgtgcacattttttttgaatgtggttcagattaattatatttctctcactttcttagctggtcctattttttcacattctggcatgtggctatcaagttagattgctgtaggcatcatattgtcatggtaactactgaacctaatgatgcagatggatggcacatccagtataataaatgatggaaaacggttcctaaaaattcatccctttccataagagggggagaatgagtgcctgatattgttaaatacctcccctttctacctcaggcctttgcaaattgatgttccagagggtccactggagtgagagggaggaggggggccgtccttggaaatttcccatttctcttttcaaacccaaaataggaatgactcttgctgtttgtcagatttgctgaaaattgctcctcacaaagaacattttttgtttgtacatgtaagttgtaaatacaggtttagtaccgttaatgttctatagttatgatccctgataataattaaacccgagataattttatagcaaaaaaaaaaaaaaggg

SEQ ID NO: 510 - DNA, 223 bp, Homo sapiens
  misc_feature: Incyte ID No: 892236.1
  unsure 21, 38, 45, 51, 58, 93, 156, 192: a, t, c, g, or other
acaggttctggattaggactnaggttttcttttgaggncctgctnttcaanttgttgncttctgtggctctaagaagacacaaggccccccgntgtgctgtttgtcctttggccgcctgctcacacacagcttctgggctgggctaaccactgcanctccagaagggttgtaggtgcagcagtctctgtcanggccgtctagttcctgacagaaggagcccaa

SEQ ID NO: 511 - DNA, 1637 bp, Homo sapiens
  misc_feature: Incyte ID No: 246935.4
cttaaagatgaaaaaccaaagaggtcagtagtcaaggactctttgttatgtttgatttatacatgctagttttgctgctatgtcctggacatgtacctgaattaagataagctgttttatgcagggcagggggatgaggaggaacagtttcagaatattcttgtatcttaatctgggtgaatggttttggggttttgttccttcttaaaacactagtatttttcactctgctctaaaagtgcaacctcattgcaggggccaaatcagaatcacagtgttcctgcatttgtgattacaagatctttcagggttctgtctcagatttgtttttcatgcagacctgaagatgagagcggcagagactatagggagagggaacgggaatatgaacgagatcaggagcgcatacttcgagaaagagagaggctgaagcggcaagaagaagagcgccgtaggcagaaggagcgctatgagaaagagaagacttttaagagaaaagaagaagaaatgaaaaaagagaaagacacacttcgggataaaggaaagaaggctgaaagtacagaatcaataggcagctcagaaaaaactgaaaagaaagaagaagtggtcaagagagatcgaataagaaacaaggatcgtccagcgatgcagctttaccaaccaggagctcgaagccgaaatcgactctgtccccctgatgacagcaccaagtctggagattcagcagcagaaaggaagcaggaaagtggtattagccatagaaaagaaggaggagaggagtgataagtccagatggccttaggtgtcctgactgtctaggcagccaaagagcacacgttaagcaatccagaggtgccttcagggcaaagaatagagagaaagggagccgctgtgctggtggggtacactgcagaggagtaagtcttgtgtcaaagcaggaatctgatcagaggttcagaattggaagtacaatttcattgcttttgcaatttctacaaattaattttaaagtgtcagaaaaaggtgacggcaaggacatgcattgcaatttgcagggggaattgtcaagtgaggacttcatcacatatgacacgagagaaaagtaagagctggttctaaaatcaaaagctgttgttcatcctgaattgaattttctgaatttgggtggagcagagtcgctttgaagccttgttccgatctaattctattgtattgttgatgataagtgttgacattgggtagtgtagaagcaacaagcatgtccttgtagtacaggtacagtgaaggatagaacacactttcgttgatacaaaaatttaaatagttatgttacttctgtatccagtgtcctaaagttttaggattagttttagttttttgtttgcttatatgagcttagcgtaaagaatatttttaaacttcgtgttttgtcatcagcatcttttctattaagaggtaaaatgtagtccttgtttgactcttgacaatccagtgtgtttgatcttaggtctcatgatctgagtgcataccctctccaggaaggaaactgcaccagtgtctattcctgttaaatagcaacttttagtctcagcttgtttcgttttgatgtcaataaatagtaacagcattcaagtgtg

SEQ ID NO: 512 - DNA, 442 bp, Homo sapiens
  misc_feature: Incyte ID No: 1019222.1
gggccgcccaactgctggacaaggacgggacgttcctgagtacactggagcacttcctgagccgctacctgaaggacgtgcggcagcaccacgtgaaggccgacaagcgggaccctgagtttgtcttctatgaccagctgaagcaagtgatgaacgcttacagggtcaagccagccatctttgacctgctgctggccttgtgcattggggcgtacctgggcatggcatacacagccgtccagcacttccatgtgctgtacaagacggtgcagagactgctgctcaaggccaaggcacagtgacagtggccatgcacaggtggcccaggagcaatatgacccaggaggtgtcaggcggggcagtggaggccatctgaagaccagctgcttgcatccctctagcacctgctgaggcctggctccccccacccaccgtaggctgc

SEQ ID NO: 513 - DNA, 3299 bp, Homo sapiens
  misc_feature: Incyte ID No: 411426.42
ctctgtctcccccccatatccgtgcgccgagctgataaaggcgccattttggaggggccgcgggagacgtggtgccgctgcgggctcgctctgccgtgcgctaggcttggtgggaaggcctgttctcgagtccgcgcttttcgtcaccgccatgtcgggaggtggtgtgattcgtggccccgcagggaacaacgattgccgcatctacgtgggtaacttacctccagacatccgaaccaaggacattgaggacgtgttctacaaatacggcgctatccgcgacatcgacctcaagaatcgccgcgggggaccgcccttcgccttcgttgagttcgaggacccgcgagacgcggaagacgcggtgtatggtcgcgacggctatgattacgatgggtaccgtctgcgggtggagtttcctcgaagcggccgtggaacaggccgaggcggcggcgggggtggaggtggcggagctccccgaggtcgctatggccccccatccaggcggtctgaaaacagagtggttgtctctggactgcctccaagtggaagttggcaggatttaaaggatcacatgcgtgaagcaggtgatgtatgttatgctgatgtttaccgagatggcactggtgtcgtggagtttgtacggaaagaagatatgacctatgcagttcgaaaactggataacactaagtttagatctcatgagggagaaactgcctacatccgggttaaagttgatgggcccagaagtccaagttatggaagatctcgatctcgaagccgtagtcgtagcagaagccgtagcagaagcaacagcaggagtcgcagttactccccaaggagaagcagaggatcaccacgctattctccccgtcatagcagatctcgctctcgtacataagatgattggtgacactttttgtagaacccatgttgtatacagttttcctttattcagtacaatcttttcattttttaattcaaactgttttgttcagaatgggctaaagtgttgaattgcattcttgtaatatccccttgctcctaacatctacattcccttcgtgtctttgataaattgtattttaagtgatgtcatagacaggattgtttaaatttagttaactccatactcttcagactgtgatattgtgtaaatgtctatctgccctggtttgtgtgaactgggatgttgggggtgtttgtggttatcttacctggggaagttcttatgtttatcttgcttttcatgtgtctttctgtagacatatctgaagagatggattaagaatgctttggattaaggattgtggagcacatttcaatcattttaggattgtcaaaaggaggattgaggaggatcagatcaataatggaggcaatggtatgactccaagtgctattgtcacagatgaaattggcagtattgaccttatactaaaaggcaggggttaaaaatgattatatacattttccttaaaacacttgcaaacattttattcagttgtctttagctacaattgctttgctttttaaaccttggcaattgtggcaaaattatattgcccattttgtagcaacttattttgctcccttccccccatttttgttttaatagggactaatgtgggaagaactggctaatttgtcacagtgcttagttacaactgttaatgtgtgacctgctgttggtgtacatgtgggtacagggtgtttttaaatccaacaagatagagtataatatcaatactgctaaatctgcatgtcctctgtgtgactgatagagcgttgctatttcatttttttaagacaaaatgaaagcaaaatatagagttccaatgtattggtgtagataatctagttgggaatacttttaagtctcaccttcccctttaaactaatattcataattggttcatatgtttaaaagactttaatttacaaattaaattgcaaatgggagcattagatttagttttagacttaggtgggtagcaatgccagtaaacttaaattacgtaacttcttgcaaccacgaaacctgtaatacgctgtacagtaacaagtgttggcattatcagttgaactgtaaatacaaaatgcttcttccaattagtctctatgatgattaagtttctaaaatttatctgaacaccattcagaaacttgttttggggaatttgatagttattgatgtgcatctgttaaactgatgacagacataactcatcattccccagaaaccttttttgattacagtatctaacattttgcctcctcttttttggttttgctggttataaaggtttggattggagagggctcactggatcccaatccttggagctggatcattggattcaaatcataatgtggataggatagggaggatgaattaccaggattcatggagcgggatcagattaccaggaacataggagtggattcctgccccaaccaaaccgcattcgtgtggatttttttattcaacttaattggctattccaaagattttttttttcctatttttgacgattggagcccttaagatgcacgatggaattgtgttttgcgttttttggtaaaaggagcaaagcgaggacctggagataaacgctggagcaatctccttggaaggattcagcacgagtagatggtaaacatttaaaggggaaagggggggtttgtttaaaatagtaaatcagtaagtcacttctaaatttaaagaaaacaaaattggagttgaagaataagtaggtttccaattggctattgccgttttctttgaaaaaataaacattttttaaaaaactatgcatggttgtcctttttcctcttcatgtaagattctaactgggtctatcagttaatctttaaattgttaagtaagataagattttgactcttgtgttaatgtgttagcaaattaaaagttctaaaaggcaatctaatggtattagccatcttttatgttaattgtaaaagtcttcaggggaaagcaaaaggggagaataaggcatttgtgtatgtaacttggtaaatgacggtgggggatggatctagcatctgaaagataagcttctctactttgttataaagtggttaaaaaactatagatgctgcttattttctggtggtcatagacaacataggcttttgtgcaaaattggttgatggctactaatgttcacttggagatagcttttgatattctcaatgaaactcatctcaaaaaaaggtaagtattaaatgttaacatcagcacagatgtattagaactgttttttgtttttgagacagag

SEQ ID NO: 514 - DNA, 306 bp, Homo sapiens
  misc_feature: Incyte ID No: 1022716.1
cctgtgtgcacttgggggcggttcttggaagagtgaggagacagcctgtcagcctctgctcattaacctaaggaccatgtgaccagtgaggtggccatcttgtgatttggtctgcattatttgttggaaaaatgccacaagaagatcacactgggatttagaagtttctggctaatacttagccaggtagccttttgtggccagattggtctacaaagagaaacagcattttggaaaagtgaaatagctttgtaacctaacatgcaattggttcaataaagacttcaaatttctttctctgattgg

What is claimed is:

1. A combination comprising a plurality of cDNAs that are differentially expressed in a liver treated with a toxin and are selected from SEQ ID NOs: 1-514 and the complements thereof.

2. The combination of claim 1 wherein each of the cDNAs is differentially expressed at least three-fold.

3. The combination of claim 1 wherein the toxin is selected from acetominophen (APAP), benzo(a)pyrene (BP), clofibrate (CLO), α-naphthylisothiocyanate (ANIT), 4-acetylaminofluorene (4-AAF), hydrazine (Hydra), fenofibrate (Feno), and carbon tetrachloride (CCLA).

4. A combination comprising a plurality of cDNAs that are differentially expressed in a liver disorder and are selected from:
a) SEQ ID NOs: 1-202;
b) SEQ ID NOs: 203-399;
c) SEQ ID NOs: 400-514; and
d) the complement of (a), (b), or (c).

5. The combination of claim 4 wherein the liver disorder is selected from biliary cirrhosis, X-linked adrenoleukodystrophy, Zellweger syndrome, hepatorenal syndrome, hepatitis, and hepatocarcinoma.

6. The combination of claim 4 wherein the liver disorder is biliary cirrhosis.

7. The combination of claim 4 wherein the cDNAs are immobilized on a substrate.

8. A high throughput method for detecting differential expression of one or more cDNAs in a sample containing nucleic acids, the method comprising:
a) hybridizing the substrate of claim 7 with nucleic acids of the sample, thereby forming one or more hybridization complexes;
b) detecting the hybridization complexes; and
c) comparing the hybridization complexes with standards, wherein the differences between the standard and sample hybridization complexes indicates differential expression of cDNAs in the sample.

9. The method of claim 8, wherein the nucleic acids of the sample are amplified prior to hybridization.

10. The method of claim 8, wherein the sample is from a subject with biliary cirrhosis and comparison with a standard defines an early, mid, or late stage of that disease.

11. A high throughput method of screening a plurality of molecules or compounds to identify a ligand which specifically binds a cDNA, the method comprising:
a) combining the combination of claim 1 with the plurality of molecules or compounds under conditions to allow specific binding; and
b) detecting specific binding between each cDNA and at least one molecule or compound, thereby identifying a ligand that specifically binds to each cDNA.

12. The method of claim 11 wherein the plurality of molecules or compounds are selected from DNA molecules, RNA molecules, peptide nucleic acid molecules, mimetics, peptides, transcription factors, repressors, and regulatory proteins.

13. An isolated cDNA selected from SEQ ID NOs: 411, 441, 432, 450, 457, 465, 474, 477, 499, 501, 510.

14. A vector containing the cDNA of claim 13.

15. A host cell containing the vector of claim 14.

16. A method for producing a protein, the method comprising the steps of:
a) culturing the host cell of claim 15 under conditions for expression of protein; and
b) recovering the protein from the host cell culture.

17. A protein or a portion thereof produced by the method of claim 16.

18. A high-throughput method for using a protein to screen a plurality of molecules or compounds to identify at least one ligand which specifically binds the protein, the method comprising:
a) combining the protein of claim 17 with the plurality of molecules or compounds under conditions to allow specific binding; and
b) detecting specific binding between the protein and a molecule or compound, thereby identifying a ligand which specifically binds the protein.

19. The method of claim 18 wherein the plurality of molecules or compounds is selected from DNA molecules, RNA molecules, peptide nucleic acid molecules, mimetics, peptides, proteins, agonists, antagonists, antibodies or their fragments, immunoglobulins, inhibitors, drug compounds, and pharmaceutical agents.

20. A method of using a protein to produce an antibody, the method comprising:
a) immunizing an animal with the protein of claim 17 under conditions to elicit an antibody response;
b) isolating animal antibodies; and
c) screening the isolated antibodies with the protein, thereby identifying an antibody which specifically binds the protein.
